United States Patent Application Publication US 2022/0162320 A1 - sequence listing, part 6

SEQ ID NO: 104580 - protein, 9 aa, Homo sapiens
  misc_feature (1)..(9): Table A1; Target 1738; HLA-B*44:03; GPX5ENSG00000224586; Epididymal secretory glutathione peroxidase (EC 1.11.1.9) (Epididymis-specific glutathione peroxidase-like protein) (EGLP) (Glutathione peroxidase 5) (GPx-5) (GSHPx-5)
NEYVSFKQY

SEQ ID NO: 104581 - protein, 9 aa, Homo sapiens
  misc_feature (1)..(9): Table A1; Target 1739; HLA-A*11:01; E9PBZ7; ENSG00000242715; Coiled-coil domain-containing protein 169
GSGLHQVSK

SEQ ID NO: 104582 - protein, 9 aa, Homo sapiens
  misc_feature (1)..(9): Table A1; Target 1740; HLA-B*44:02; SYCY2; ENSG00000244476; Syncytin-2 (Endogenous retrovirus group FRD member 1) (Envelope polyprotein)
  misc_feature (1)..(9): (HERV-FRD) (HERV-FRD; 6p24.1 provirus ancestral Env polyprotein) [Cleaved into: Surface protein (SU); Transmembrane protein (TM)]
IEAELHISY

SEQ ID NO: 104583 - protein, 9 aa, Homo sapiens
  misc_feature (1)..(9): Table A1; Target 1741; HLA-A*26:01; GGTL2; ENSG00000100121; Gamma-glutamyltransferase light chain 2 (Gamma-glutamyltransferase-like protein 4)
DTTHPISYY

SEQ ID NO: 104584 - protein, 9 aa, Homo sapiens
  misc_feature (1)..(9): Table A1; Target 1742; HLA-B*51:01; TTLL2; ENSG00000120440; Probable tubulin polyglutamylase TTLL2 (EC 6.-.-.-) (Testis-specific protein NYD-TSPG) (Tubulin--tyrosine ligase-like protein 2)
YAHLTNSSI

SEQ ID NO: 104585 - protein, 9 aa, Homo sapiens
  misc_feature (1)..(9): Table A1; Target 1743; HLA-A*11:01; CRIS1; ENSG00000124812; Cysteine-rich secretory protein 1 (CRISP-1) (AEG-like protein) (ARP) (Acidic epididymal glycoprotein homolog)
AQNARIFSK

SEQ ID NO: 104586 - protein, 9 aa, Homo sapiens
  misc_feature (1)..(9): Table A1; Target 1744; HLA-A*02:01; CRIS1; ENSG00000124812; Cysteine-rich secretory protein 1 (CRISP-1) (AEG-like protein) (ARP) (Acidic epididymal glycoprotein homolog)
KLVTDLPNV

SEQ ID NO: 104587 - protein, 9 aa, Homo sapiens
  misc_feature (1)..(9): Table A1; Target 1745; HLA-C*16:01; RHXF2; ENSG00000131721; Rhox homeobox family member 2 (Paired-like homeobox protein PEPP-2) (Testis homeobox gene 1)
SEKEPGQQY

SEQ ID NO: 104588 - protein, 9 aa, Homo sapiens
  misc_feature (1)..(9): Table A1; Target 1746; HLA-A*29:02; NMUR2; ENSG00000132911; Neuromedin-U receptor 2 (NMU-R2) (G-protein coupled receptor FM-4) (G-protein coupled receptor TGR-1)
HVVSGVFFY

SEQ ID NO: 104589 - protein, 9 aa, Homo sapiens
  misc_feature (1)..(9): Table A1; Target 1747; HLA-A*02:07; NMUR2; ENSG00000132911; Neuromedin-U receptor 2 (NMU-R2) (G-protein coupled receptor FM-4) (G-protein coupled receptor TGR-1)
YVPIFVVGV

SEQ ID NO: 104590 - protein, 9 aa, Homo sapiens
  misc_feature (1)..(9): Table A1; Target 1748; HLA-A*02:07; F71F1; ENSG00000135248; Protein FAM71F1 (Protein FAM137A) (Testis development protein NYD-SP18)
TVTEKIYYL

SEQ ID NO: 104591 - protein, 8 aa, Homo sapiens
  misc_feature (1)..(8): Table A1; Target 1749; HLA-B*51:01; FNDC7; ENSG00000143107; Fibronectin type III domain-containing protein 7
SAPEIPTI

SEQ ID NO: 104592 - protein, 8 aa, Homo sapiens
  misc_feature (1)..(8): Table A1; Target 1750; HLA-B*18:01; X6R6V8; ENSG00000143552; Nuclear pore membrane glycoprotein 210-like
DEVQIEVV

SEQ ID NO: 104593 - protein, 9 aa, Homo sapiens
  misc_feature (1)..(9): Table A1; Target 1751; HLA-B*35:01; BOLLENSG00000152430; Protein boule-like;
QPIYQQPAY

SEQ ID NO: 104594 - protein, 9 aa, Homo sapiens
  misc_feature (1)..(9): Table A1; Target 1752; HLA-A*29:02; PANX3; ENSG00000154143; Pannexin-3
IFTSATYLY

SEQ ID NO: 104595 - protein, 9 aa, Homo sapiens
  misc_feature (1)..(9): Table A1; Target 1753; HLA-A*30:02; PANX3; ENSG00000154143; Pannexin-3
RSHSLVATY

SEQ ID NO: 104596 - protein, 10 aa, Homo sapiens
  misc_feature (1)..(10): Table A1; Target 1754; HLA-A*29:02; PANX3; ENSG00000154143; Pannexin-3
YFEFPLLERY

SEQ ID NO: 104597 - protein, 11 aa, Homo sapiens
  misc_feature (1)..(11): Table A1; Target 1755; HLA-A*11:01; PSA7L; ENSG00000154611; Proteasome subunit alpha type-7-like (EC 3.4.25.1)
GTNIVVLGVEK

SEQ ID NO: 104598 - protein, 10 aa, Homo sapiens
  misc_feature (1)..(10): Table A1; Target 1756; HLA-A*30:02; MEIOB; ENSG00000162039; Meiosis-specific with OB domain-containing protein (EC 3.1.-.-)
AVKSVGEPKY

SEQ ID NO: 104599 - protein, 9 aa, Homo sapiens
  misc_feature (1)..(9): Table A1; Target 1757; HLA-B*18:01; MEIOB; ENSG00000162039; Meiosis-specific with OB domain-containing protein (EC 3.1.-.-)
DETESSFAM

SEQ ID NO: 104600 - protein, 9 aa, Homo sapiens
  misc_feature (1)..(9): Table A1; Target 1758; HLA-C*02:02; MEIOB; ENSG00000162039; Meiosis-specific with OB domain-containing protein (EC 3.1.-.-)
FASDVRINF

SEQ ID NO: 104601 - protein, 9 aa, Homo sapiens
  misc_feature (1)..(9): Table A1; Target 1759; HLA-C*16:01; MEIOB; ENSG00000162039; Meiosis-specific with OB domain-containing protein (EC 3.1.-.-)
FASDVRINF

SEQ ID NO: 104602 - protein, 9 aa, Homo sapiens
  misc_feature (1)..(9): Table A1; Target 1760; HLA-A*03:01; MEIOB; ENSG00000162039; Meiosis-specific with OB domain-containing protein (EC 3.1.-.-)
KVIGIVIGK

SEQ ID NO: 104603 - protein, 9 aa, Homo sapiens
  misc_feature (1)..(9): Table A1; Target 1761; HLA-A*11:01; MEIOB; ENSG00000162039; Meiosis-specific with OB domain-containing protein (EC 3.1.-.-)
KVIGIVIGK

SEQ ID NO: 104604 - protein, 9 aa, Homo sapiens
  misc_feature (1)..(9): Table A1; Target 1762; HLA-C*04:01; MEIOB; ENSG00000162039; Meiosis-specific with OB domain-containing protein (EC 3.1.-.-)
LYDETESSF

SEQ ID NO: 104605 - protein, 9 aa, Homo sapiens
  misc_feature (1)..(9): Table A1; Target 1763; HLA-A*02:07; MEIOB; ENSG00000162039; Meiosis-specific with OB domain-containing protein (EC 3.1.-.-)
SLDFKSVFL

SEQ ID NO: 104606 - protein, 9 aa, Homo sapiens
  misc_feature (1)..(9): Table A1; Target 1764; HLA-B*51:01; MEIOB; ENSG00000162039; Meiosis-specific with OB domain-containing protein (EC 3.1.-.-)
YAYISTLNI

SEQ ID NO: 104607 - protein, 11 aa, Homo sapiens
  misc_feature (1)..(11): Table A1; Target 1765; HLA-B*44:03; PRDM9; ENSG00000164256; Histone-lysine N-methyltransferase PRDM9 (EC 2.1.1.43) (PR domain zinc finger protein 9) (PR domain-containing protein 9)
DEYGQELGIKW

SEQ ID NO: 104608 - protein, 10 aa, Homo sapiens
  misc_feature (1)..(10): Table A1; Target 1766; HLA-B*44:03; SPT19; ENSG00000166118; Spermatogenesis-associated protein 19, mitochondrial (Spermatogenic cell-specific gene 1 protein) (Spergen-1)
SEAVSVLHHW

SEQ ID NO: 104609 - protein, 11 aa, Homo sapiens
  misc_feature (1)..(11): Table A1; Target 1767; HLA-A*11:01; MB3L1; ENSG00000170948; Methyl-CpG-binding domain protein 3-like 1 (MBD3-like protein 1)
STLDLANTLQK

SEQ ID NO: 104610 - protein, 11 aa, Homo sapiens
  misc_feature (1)..(11): Table A1; Target 1768; HLA-B*44:03; TRIMM; ENSG00000179046; Probable E3 ubiquitin-protein ligase TRIML2 (EC 2.3.2.27) (RING-type E3 ubiquitin transferase TRIML2) (SPRY domain-containing protein 6) (Tripartite motif family-like
QEAAENYRKLF

SEQ ID NO: 104611 - protein, 9 aa, Homo sapiens
  misc_feature (1)..(9): Table A1; Target 1769; HLA-A*24:02; FTMTENSG00000181867; Ferritin, mitochondrial (EC 1.16.3.1)
EYLFDTHTL

SEQ ID NO: 104612 - protein, 9 aa, Homo sapiens
  misc_feature (1)..(9): Table A1; Target 1770; HLA-A*24:02; FTMTENSG00000181867; Ferritin, mitochondrial (EC 1.16.3.1)
VYLSMAYYF

SEQ ID NO: 104613 - protein, 10 aa, Homo sapiens
  misc_feature (1)..(10): Table A1; Target 1771; HLA-A*03:01; H0YFA1; ENSG00000185958; Protein FAM186A (Fragment)
QTLGIPLTPK

SEQ ID NO: 104614 - protein, 11 aa, Homo sapiens
  misc_feature (1)..(11): Table A1; Target 1772; HLA-A*29:02; CS067; ENSG00000188032; UPF0575 protein C19orf67
LFSPITQQLRY

SEQ ID NO: 104615 - protein, 9 aa, Homo sapiens
  misc_feature (1)..(9): Table A1; Target 1773; HLA-A*02:01; S22AO; ENSG00000197658; Solute carrier family 22 member 24
ALAPLLMTL

SEQ ID NO: 104616 - protein, 9 aa, Homo sapiens
  misc_feature (1)..(9): Table A1; Target 1774; HLA-A*30:02; DPRXENSG00000204595; Divergent paired-related homeobox
AAHPIGLVY

SEQ ID NO: 104617 - protein, 9 aa, Homo sapiens
  misc_feature (1)..(9): Table A1; Target 1775; HLA-A*30:02; CD051; ENSG00000237136; Uncharacterized protein C4orf51
SVTTYTGSY

SEQ ID NO: 104618 - protein, 9 aa, Homo sapiens
  misc_feature (1)..(9): Table A1; Target 1776; HLA-B*44:03; ASIC5; ENSG00000256394; Acid-sensing ion channel 5 (ASIC5) (Amiloride-sensitive cation channel 5) (Human intestine Na(+) channel) (HINaC)
AENGLLEKI

SEQ ID NO: 104619 - protein, 11 aa, Homo sapiens
  misc_feature (1)..(11): Table A1; Target 1777; HLA-B*44:03; ASIC5; ENSG00000256394; Acid-sensing ion channel 5 (ASIC5) (Amiloride-sensitive cation channel 5) (Human intestine Na(+) channel) (HINaC)
EEIEYPATISY

SEQ ID NO: 104620 - protein, 9 aa, Homo sapiens
  misc_feature (1)..(9): Table A1; Target 1778; HLA-B*18:01; ASIC5; ENSG00000256394; Acid-sensing ion channel 5 (ASIC5) (Amiloride-sensitive cation channel 5) (Human intestine Na(+) channel) (HINaC)
IEYPATISY

SEQ ID NO: 104621 - protein, 8 aa, Homo sapiens
  misc_feature (1)..(8): Table A1; Target 1779; HLA-B*18:01; ASIC5; ENSG00000256394; Acid-sensing ion channel 5 (ASIC5) (Amiloride-sensitive cation channel 5) (Human intestine Na(+) channel) (HINaC)
MEFPAVTF

SEQ ID NO: 104622 - protein, 9 aa, Homo sapiens
  misc_feature (1)..(9): Table A1; Target 1780; HLA-A*11:01; DUXAENSG00000258873; Double homeobox protein A
ASQLHTLIK

SEQ ID NO: 104623 - protein, 11 aa, Homo sapiens
  misc_feature (1)..(11): Table A1; Target 1781; HLA-B*44:02; DUXAENSG00000258873; Double homeobox protein A
EEQLKILINTF

SEQ ID NO: 104624 - protein, 9 aa, Homo sapiens
  misc_feature (1)..(9): Table A1; Target 1782; HLA-A*31:01; DUXAENSG00000258873; Double homeobox protein A
RIQIWFQNR

SEQ ID NO: 104625 - protein, 9 aa, Homo sapiens
  misc_feature (1)..(9): Table A1; Target 1783; HLA-A*31:01; DUXAENSG00000258873; Double homeobox protein A
RVQIWFQNR

SEQ ID NO: 104626 - protein, 10 aa, Homo sapiens
  misc_feature (1)..(10): Table A1; Target 1784; HLA-A*11:01; ADAM7; ENSG00000069206; Disintegrin and metalloproteinase domain-containing protein 7 (ADAM 7) (Sperm maturation-related glycoprotein GP-83)
GIADPNQSAK

SEQ ID NO: 104627 - protein, 9 aa, Homo sapiens
  misc_feature (1)..(9): Table A1; Target 1785; HLA-A*29:02; TRPC5; ENSG00000072315; Short transient receptor potential channel 5 (TrpC5) (Transient receptor protein 5) (TRP-5) (hTRP-5) (hTRP5)
GLNQLYFYY

SEQ ID NO: 104628 - protein, 10 aa, Homo sapiens
  misc_feature (1)..(10): Table A1; Target 1786; HLA-B*35:01; WNT8B; ENSG00000075290; Protein Wnt-8b
HAISSAGVMY

SEQ ID NO: 104629 - protein, 9 aa, Homo sapiens
  misc_feature (1)..(9): Table A1; Target 1787; HLA-A*26:01; SE1L2; ENSG00000101251; Protein sel-1 homolog 2 (Suppressor of lin-12-like protein 2) (Sel-1L2)
EVAQSNSAF

SEQ ID NO: 104630 - protein, 9 aa, Homo sapiens
  misc_feature (1)..(9): Table A1; Target 1788; HLA-A*02:07; DKKL1; ENSG00000104901; Dickkopf-like protein 1 (Cancer/testis antigen 34) (CT34) (Protein soggy-1) (SGY-1)
ATDSFHTEL

SEQ ID NO: 104631 - protein, 9 aa, Homo sapiens
  misc_feature (1)..(9): Table A1; Target 1789; HLA-A*24:02; GCNT7; ENSG00000124091; Beta-1,3-galactosyl-O-glycosyl-glycoprotein beta-1,6-N-acetylglucosaminyltransferase 7 (EC 2.4.1.-)
IYAPPNNRF

SEQ ID NO: 104632 - protein, 8 aa, Homo sapiens
  misc_feature (1)..(8): Table A1; Target 1790; HLA-B*51:01; AMELX; ENSG00000125363; Amelogenin, X isoform
VPAQQPVI

SEQ ID NO: 104633 - protein, 8 aa, Homo sapiens
  misc_feature (1)..(8): Table A1; Target 1791; HLA-B*18:01; CCD83; ENSG00000150676; Coiled-coil domain-containing protein 83
DESTILHL

SEQ ID NO: 104634 - protein, 9 aa, Homo sapiens
  misc_feature (1)..(9): Table A1; Target 1792; HLA-B*44:03; IZUM2; ENSG00000161652; Izumo sperm-egg fusion protein 2
MEGPFFRDY

SEQ ID NO: 104635 - protein, 9 aa, Homo sapiens
  misc_feature (1)..(9): Table A1; Target 1793; HLA-B*35:01; KCNV2; ENSG00000168263; Potassium voltage-gated channel subfamily V member 2 (Voltage-gated potassium channel subunit Kv8.2)
DPAVFQLVY

SEQ ID NO: 104636 - protein, 10 aa, Homo sapiens
  misc_feature (1)..(10): Table A1; Target 1794; HLA-A*11:01; MRO2B; ENSG00000171495; Maestro heat-like repeat-containing protein family member 2B (HEAT repeat-containing protein 7B2) (Sperm PKA-interacting factor) (SPIF)
GSYSNNSTEK

SEQ ID NO: 104637 - protein, 9 aa, Homo sapiens
  misc_feature (1)..(9): Table A1; Target 1795; HLA-A*11:01; WDR87; ENSG00000171804; WD repeat-containing protein 87 (Testis development protein NYD-SP11)
ATAQKLKKK

SEQ ID NO: 104638 - protein, 10 aa, Homo sapiens
  misc_feature (1)..(10): Table A1; Target 1796; HLA-A*29:02; UROL1; ENSG00000177398; Uromodulin-like 1 (Olfactorin)
GTATLLIVRY

SEQ ID NO: 104639 - protein, 10 aa, Homo sapiens
  misc_feature (1)..(10): Table A1; Target 1797; HLA-A*11:01; MAGBA; ENSG00000177689; Melanoma-associated antigen B10 (MAGE-B10 antigen)
ATAGARSKVK

SEQ ID NO: 104640 - protein, 9 aa, Homo sapiens
  misc_feature (1)..(9): Table A1; Target 1798; HLA-A*11:01; SG11A; ENSG00000178287; Sperm-associated antigen 11A (Human epididymis-specific protein 2) (He2) (Protein EP2) (Sperm antigen HE2)
GTNGFQLLR

SEQ ID NO: 104641 - protein, 11 aa, Homo sapiens
  misc_feature (1)..(11): Table A1; Target 1799; HLA-A*02:07; SG11A; ENSG00000178287; Sperm-associated antigen 11A (Human epididymis-specific protein 2) (He2) (Protein EP2) (Sperm antigen HE2)
LLPPRTPPYQV

SEQ ID NO: 104642 - protein, 9 aa, Homo sapiens
  misc_feature (1)..(9): Table A1; Target 1800; HLA-B*51:01; SG11A; ENSG00000178287; Sperm-associated antigen 11A (Human epididymis-specific protein 2) (He2) (Protein EP2) (Sperm antigen HE2)
VPLGIRNTI

SEQ ID NO: 104643 - protein, 9 aa, Homo sapiens
  misc_feature (1)..(9): Table A1; Target 1801; HLA-B*46:01; FA71C; ENSG00000180219; Protein FAM71C
ILRPPVEAY

SEQ ID NO: 104644 - protein, 9 aa, Homo sapiens
  misc_feature (1)..(9): Table A1; Target 1802; HLA-A*02:01; SAGE1; ENSG00000181433; Sarcoma antigen 1 (Cancer/testis antigen 14) (CT14)
VLSAVTPEL

SEQ ID NO: 104645 - protein, 9 aa, Homo sapiens
  misc_feature (1)..(9): Table A1; Target 1803; HLA-A*02:07; ADIGENSG00000182035; Adipogenin;
VVPPWNPQL

SEQ ID NO: 104646 - protein, 10 aa, Homo sapiens
  misc_feature (1)..(10): Table A1; Target 1804; HLA-B*44:03; D7UEQ8; ENSG00000183206; POTE ankyrin domain family member C
DEYGNTTLHY

SEQ ID NO: 104647 - protein, 9 aa, Homo sapiens
  misc_feature (1)..(9): Table A1; Target 1805; HLA-A*11:01; D7UEQ8; ENSG00000183206; POTE ankyrin domain family member C
SQDEILTNK

SEQ ID NO: 104648 - protein, 9 aa, Homo sapiens
  misc_feature (1)..(9): Table A1; Target 1806; HLA-A*01:01; NALP9; ENSG00000185792; NACHT, LRR and PYD domains-containing protein 9 (Nucleotide-binding oligomerization domain protein 6) (PYRIN and NACHT-containing protein 12)
FSDFGLLWY

SEQ ID NO: 104649 - protein, 8 aa, Homo sapiens
  misc_feature (1)..(8): Table A1; Target 1807; HLA-B*46:01; DCC ENSG00000187323; Netrin receptor DCC (Colorectal cancer suppressor) (Immunoglobulin superfamily DCC subclass member 1) (Tumor suppressor protein DCC)
NAITGSAF

SEQ ID NO: 104650 - protein, 9 aa, Homo sapiens
  misc_feature (1)..(9): Table A1; Target 1808; HLA-B*46:01; H9KVA5; ENSG00000187959; Putative cleavage and polyadenylation-specificity factor subunit 4-like protein
FAFEKDVEM

SEQ ID NO: 104651 - protein, 9 aa, Homo sapiens
  misc_feature (1)..(9): Table A1; Target 1809; HLA-B*44:03; SPXN3; ENSG00000189252; Sperm protein associated with the nucleus on the X chromosome N3 (Nuclear-associated protein SPAN-Xn3) (SPANX-N3) (SPANX family member N3)
SEYPIIFVY

SEQ ID NO: 104652 - protein, 10 aa, Homo sapiens
  misc_feature (1)..(10): Table A1; Target 1810; HLA-A*01:01; HORNENSG00000197915; Hornerin; ;
GSDFGHSSSY

SEQ ID NO: 104653 - protein, 9 aa, Homo sapiens
  misc_feature (1)..(9): Table A1; Target 1811; HLA-B*44:02; Q5VXJ5; ENSG00000198765; Synaptonemal complex protein 1 (Fragment)
EEETLKTLY

SEQ ID NO: 104654 - protein, 9 aa, Homo sapiens
  misc_feature (1)..(9): Table A1; Target 1812; HLA-A*26:01; F8W8N9; ENSG00000204930; Protein FAM221B (Fragment)
ETPSETPTY

SEQ ID NO: 104655 - protein, 11 aa, Homo sapiens
  misc_feature (1)..(11): Table A1; Target 1813; HLA-A*01:01; F8W8N9; ENSG00000204930; Protein FAM221B (Fragment)
ISETPSETPTY

SEQ ID NO: 104656 - protein, 10 aa, Homo sapiens
  misc_feature (1)..(10): Table A1; Target 1814; HLA-B*44:03; F8W8N9; ENSG00000204930; Protein FAM221B (Fragment)
SETPSETPTY

SEQ ID NO: 104657 - protein, 10 aa, Homo sapiens
  misc_feature (1)..(10): Table A1; Target 1815; HLA-B*44:03; 1A1L2; ENSG00000205126; Probable inactive 1-aminocyclopropane-1-carboxylate synthase-like protein 2 (ACC synthase-like protein 2)
EEVARFLTYY

SEQ ID NO: 104658 - protein, 9 aa, Homo sapiens
  misc_feature (1)..(9): Table A1; Target 1816; HLA-A*29:02; MAGAC; ENSG00000213401; Melanoma-associated antigen 12 (Cancer/testis antigen 1.12) (CT1.12) (MAGE-12 antigen) (MAGE12F antigen)
STLPTTINY

SEQ ID NO: 104659 - protein, 10 aa, Homo sapiens
  misc_feature (1)..(10): Table A1; Target 1817; HLA-B*44:03; GRCR1; ENSG00000215203; Glutaredoxin domain-containing cysteine-rich protein 1
SEAPSLPVVF

SEQ ID NO: 104660 - protein, 9 aa, Homo sapiens
  misc_feature (1)..(9): Table A1; Target 1818; HLA-A*30:02; A0A1B0GTN1; ENSG00000224960; Putative SMEK homolog 3
GTGQVSSTY

SEQ ID NO: 104661 - protein, 9 aa, Homo sapiens
  misc_feature (1)..(9): Table A1; Target 1819; HLA-A*29:02; PATE3; ENSG00000236027; Prostate and testis expressed protein 3 (Acrosomal vesicle protein HEL-127) (PATE-like protein DJ) (PATE-DJ)
HFLFLFLLY

SEQ ID NO: 104662 - protein, 9 aa, Homo sapiens
  misc_feature (1)..(9): Table A1; Target 1820; HLA-B*18:01; BHMG1; ENSG00000237452; Basic helix-loop-helix and HMG box domain-containing protein 1
MEYLTQAAF

SEQ ID NO: 104663 - protein, 11 aa, Homo sapiens
  misc_feature (1)..(11): Table A1; Target 1821; HLA-B*27:02; SYCY2; ENSG00000244476; Syncytin-2 (Endogenous retrovirus group FRD member 1) (Envelope polyprotein) (HERV-FRD)
  misc_feature (1)..(11): (HERV-FRD; 6p24.1 provirus ancestral Env polyprotein) [Cleaved into: Surface protein (SU); Transmembrane protein (TM)]
GTGTGIAGITK

SEQ ID NO: 104664 - protein, 9 aa, Homo sapiens
  misc_feature (1)..(9): Table A1; Target 1822; HLA-B*44:02; RFPLB; ENSG00000251258; Ret finger protein-like 4B (RING finger protein 211)
VEVGEVKSW

SEQ ID NO: 104665 - protein, 9 aa, Homo sapiens
  misc_feature (1)..(9): Table A1; Target 1823; HLA-A*01:01; CL19A; ENSG00000261210; C-type lectin domain family 19 member A
WTDGSSYDY

SEQ ID NO: 104666 - protein, 9 aa, Homo sapiens
  misc_feature (1)..(9): Table A1; Target 1824; HLA-B*44:03; CALR3; ENSG00000269058; Calreticulin-3 (Calreticulin-2) (Calsperin)
EEFLDGEHW

SEQ ID NO: 104667 - protein, 11 aa, Homo sapiens
  misc_feature (1)..(11): Table A1; Target 1825; HLA-B*44:03; CALR3; ENSG00000269058; Calreticulin-3 (Calreticulin-2) (Calsperin)
SEFENIGAIGL

SEQ ID NO: 104668 - protein, 9 aa, Homo sapiens
  misc_feature (1)..(9): Table A1; Target 1826; HLA-A*02:01; TRPC7; ENSG00000069018; Short transient receptor potential channel 7 (TrpC7) (Transient receptor protein 7) (TRP-7) (hTRP7)
GLSEVISVV

SEQ ID NO: 104669 - protein, 9 aa, Homo sapiens
  misc_feature (1)..(9): Table A1; Target 1827; HLA-B*44:03; TRPC7; ENSG00000069018; Short transient receptor potential channel 7 (TrpC7) (Transient receptor protein 7) (TRP-7) (hTRP7)
IETEFKNDY

SEQ ID NO: 104670 - protein, 9 aa, Homo sapiens
  misc_feature (1)..(9): Table A1; Target 1828; HLA-A*24:02; ADAM2; ENSG00000104755; Disintegrin and metalloproteinase domain-containing protein 2 (ADAM 2) (Cancer/testis antigen 15) (CT15) (Fertilin subunit beta) (PH-30) (PH30) (PH30-beta)
IYANISGHL

SEQ ID NO: 104671 - protein, 11 aa, Homo sapiens
  misc_feature (1)..(11): Table A1; Target 1829; HLA-A*11:01; ZP4 ENSG00000116996; Zona pellucida sperm-binding protein 4 (Zona pellucida glycoprotein 4) (Zp-4) (Zona pellucida protein B) [Cleaved into: Processed zona pellucida sperm-binding protein 4]
AVYENELVATR

SEQ ID NO: 104672 - protein, 9 aa, Homo sapiens
  misc_feature (1)..(9): Table A1; Target 1830; HLA-B*44:03; SACA1; ENSG00000118434; Sperm acrosome membrane-associated protein 1 (Sperm acrosomal membrane-associated protein 32)
NEIVATIKF

SEQ ID NO: 104673 - protein, 10 aa, Homo sapiens
  misc_feature (1)..(10): Table A1; Target 1831; HLA-A*30:02; CRIS1; ENSG00000124812; Cysteine-rich secretory protein 1 (CRISP-1) (AEG-like protein) (ARP) (Acidic epididymal glycoprotein homolog)
AQNARIFSKY

SEQ ID NO: 104674 - protein, 10 aa, Homo sapiens
  misc_feature (1)..(10): Table A1; Target 1832; HLA-B*44:03; CRIS1; ENSG00000124812; Cysteine-rich secretory protein 1 (CRISP-1) (AEG-like protein) (ARP) (Acidic epididymal glycoprotein homolog)
EEIVNIHNAL

SEQ ID NO: 104675 - protein, 11 aa, Homo sapiens
  misc_feature (1)..(11): Table A1; Target 1833; HLA-A*03:01; CRIS1; ENSG00000124812; Cysteine-rich secretory protein 1 (CRISP-1) (AEG-like protein) (ARP) (Acidic epididymal glycoprotein homolog)
RVVPPASNMLK

SEQ ID NO: 104676 - protein, 11 aa, Homo sapiens
  misc_feature (1)..(11): Table A1; Target 1834; HLA-A*03:01; BAFLENSG00000125888; Barrier-to-autointegration factor-like protein (BAF-L) (Barrier-to-autointegration factor 2)
AINLVTKGINK

SEQ ID NO: 104677 - protein, 11 aa, Homo sapiens
  misc_feature (1)..(11): Table A1; Target 1835; HLA-A*11:01; BAFLENSG00000125888; Barrier-to-autointegration factor-like protein (BAF-L) (Barrier-to-autointegration factor 2)
AINLVTKGINK

SEQ ID NO: 104678 - protein, 9 aa, Homo sapiens
  misc_feature (1)..(9): Table A1; Target 1836; HLA-A*02:07; BAFLENSG00000125888; Barrier-to-autointegration factor-like protein (BAF-L) (Barrier-to-autointegration factor 2)
WVDGISHEL

SEQ ID NO: 104679 - protein, 9 aa, Homo sapiens
  misc_feature (1)..(9): Table A1; Target 1837; HLA-A*02:07; MMP20; ENSG00000137674; Matrix metalloproteinase-20 (MMP-20) (EC 3.4.24.-) (Enamel metalloproteinase) (Enamelysin)
KLDQTTMNV

SEQ ID NO: 104680 - protein, 9 aa, Homo sapiens
  misc_feature (1)..(9): Table A1; Target 1838; HLA-A*29:02; MMP20; ENSG00000137674; Matrix metalloproteinase-20 (MMP-20) (EC 3.4.24.-) (Enamel metalloproteinase) (Enamelysin)
YFFSGPKTY

SEQ ID NO: 104681 - protein, 9 aa, Homo sapiens
  misc_feature (1)..(9): Table A1; Target 1839; HLA-A*02:01; NDST4; ENSG00000138653; Bifunctional heparan sulfate N-deacetylase/N-sulfotransferase 4 (EC 2.8.2.8) (Glucosaminyl N-deacetylase/N-sulfotransferase 4) (NDST-4)
  misc_feature (1)..(9): (N-heparan sulfate sulfotransferase 4) (N-HSST 4) [Includes: Heparan sulfate N-deacetylase 4 (EC 3.-.-.-); Heparan sulfate N-sulfotransferase 4 (EC 2.8.2.-)]
TLIETTAEA

SEQ ID NO: 104682 - protein, 9 aa, Homo sapiens
  misc_feature (1)..(9): Table A1; Target 1840; HLA-A*02:01; TRI43; ENSG00000144015; Tripartite motif-containing protein 43
FLWRGNVVL

SEQ ID NO: 104683 - protein, 8 aa, Homo sapiens
  misc_feature (1)..(8): Table A1; Target 1841; HLA-B*18:01; ZAN ENSG00000146839; Zonadhesin;
QEVITTVY

SEQ ID NO: 104684 - protein, 9 aa, Homo sapiens
  misc_feature (1)..(9): Table A1; Target 1842; HLA-B*44:02; OCSTP; ENSG00000149635; Osteoclast stimulatory transmembrane protein (OC-STAMP)
AEQLVKTGW

SEQ ID NO: 104685 - protein, 9 aa, Homo sapiens
  misc_feature (1)..(9): Table A1; Target 1843; HLA-A*11:01; PO4F2; ENSG00000151615; POU domain, class 4, transcription factor 2 (Brain-specific homeobox/POU domain protein 3B) (Brain-3B) (Brn-3B)
AVDIVSQSK

SEQ ID NO: 104686 - protein, 9 aa, Homo sapiens
  misc_feature (1)..(9): Table A1; Target 1844; HLA-B*18:01; J3KNE0; ENSG00000153165; RanBP2-like and GRIP domain-containing protein 3
EESSINYTF

SEQ ID NO: 104687 - protein, 9 aa, Homo sapiens
  misc_feature (1)..(9): Table A1; Target 1845; HLA-A*02:07; J3KNE0; ENSG00000153165; RanBP2-like and GRIP domain-containing protein 3
KLPVPLESV

SEQ ID NO: 104688 - protein, 9 aa, Homo sapiens
  misc_feature (1)..(9): Table A1; Target 1846; HLA-B*35:01; ASZ1ENSG00000154438; Ankyrin repeat, SAM and basic leucine zipper domain-containing protein 1 (Ankyrin-like protein 1) (Germ cell-specific ankyrin, SAM and basic leucine zipper domain-containing protein)
TAFGDLEVF

SEQ ID NO: 104689 - protein, 10 aa, Homo sapiens
  misc_feature (1)..(10): Table A1; Target 1847; HLA-A*01:01; GG6L2; ENSG00000174450; Golgin subfamily A member 6-like protein 2
KTELETALYY

SEQ ID NO: 104690 - protein, 9 aa, Homo sapiens
  misc_feature (1)..(9): Table A1; Target 1848; HLA-B*18:01; GG6L2; ENSG00000174450; Golgin subfamily A member 6-like protein 2
TELETALYY

SEQ ID NO: 104691 - protein, 9 aa, Homo sapiens
  misc_feature (1)..(9): Table A1; Target 1849; HLA-A*26:01; UROL1; ENSG00000177398; Uromodulin-like 1 (Olfactorin)
ESIPESSLY

SEQ ID NO: 104692 - protein, 9 aa, Homo sapiens
  misc_feature (1)..(9): Table A1; Target 1850; HLA-A*02:01; A3LT2; ENSG00000184389; Alpha-1,3-galactosyltransferase 2 (EC 2.4.1.87) (Isoglobotriaosylceramide synthase) (iGb3 synthase) (iGb3S)
ALAESVAQL

SEQ ID NO: 104693 - protein, 9 aa, Homo sapiens
  misc_feature (1)..(9): Table A1; Target 1851; HLA-B*51:01; PIWL3; ENSG00000184571; Piwi-like protein 3
LAYLVGQSI

SEQ ID NO: 104694 - protein, 9 aa, Homo sapiens
  misc_feature (1)..(9): Table A1; Target 1852; HLA-A*29:02; VHLLENSG00000189030; Von Hippel-Lindau-like protein (VHL-like protein) (VLP)
IVLPVWLNY

SEQ ID NO: 104695 - protein, 9 aa, Homo sapiens
  misc_feature (1)..(9): Table A1; Target 1853; HLA-A*29:02; DPRXENSG00000204595; Divergent paired-related homeobox
AAHPIGLVY

SEQ ID NO: 104696 - protein, 9 aa, Homo sapiens
  misc_feature (1)..(9): Table A1; Target 1854; HLA-B*35:01; VCX3B; ENSG00000205642; Variable charge X-linked protein 3B (Variably charged protein X-C) (VCX-C)
EPLSVTAKY

SEQ ID NO: 104697 - protein, 9 aa, Homo sapiens
  misc_feature (1)..(9): Table A1; Target 1855; HLA-A*11:01; LEUTX; ENSG00000213921; Leucine-twenty homeobox
ATMGKLASK

SEQ ID NO: 104698 - protein, 9 aa, Homo sapiens
  misc_feature (1)..(9): Table A1; Target 1856; HLA-A*29:02; M4A18; ENSG00000214782; Membrane-spanning 4-domains subfamily A member 18
IITDLSLYY

SEQ ID NO: 104699 - protein, 9 aa, Homo sapiens
  misc_feature (1)..(9): Table A1; Target 1857; HLA-A*31:01; M4A18; ENSG00000214782; Membrane-spanning 4-domains subfamily A member 18
QSQPIGYQR

SEQ ID NO: 104700 - protein, 9 aa, Homo sapiens
  misc_feature (1)..(9): Table A1; Target 1858; HLA-A*30:02; GRCR1; ENSG00000215203; Glutaredoxin domain-containing cysteine-rich protein 1
KNIALNGEY

SEQ ID NO: 104701 - protein, 9 aa, Homo sapiens
  misc_feature (1)..(9): (Pregnancy-specific glycoprotein 11) (Pregnancy-specific beta-1-glycoprotein 13) (PS-beta-G-13) (PSBG-13) (Pregnancy-specific glycoprotein 13)
LFLFGVTKY

SEQ ID NO: 104702 - protein, 9 aa, Homo sapiens
  misc_feature (1)..(9): Table A1; Target 1860; HLA-B*51:01; PSG11; ENSG00000243130; Pregnancy-specific beta-1-glycoprotein 11 (PS-beta-G-11) (PSBG-11)
  misc_feature (1)..(9): (Pregnancy-specific glycoprotein 11) (Pregnancy-specific beta-1-glycoprotein 13) (PS-beta-G-13) (PSBG-13) (Pregnancy-specific glycoprotein 13)
YPKLPMPYI

SEQ ID NO: 104703 - protein, 10 aa, Homo sapiens
  misc_feature (1)..(10): Table A1; Target 1861; HLA-A*24:02; PCDG8; ENSG00000253767; Protocadherin gamma-A8 (PCDH-gamma-A8)
VYIPGSNATL

SEQ ID NO: 104704 - protein, 11 aa, Homo sapiens
  misc_feature (1)..(11): Table A1; Target 1862; HLA-A*03:01; ASIC5; ENSG00000256394; Acid-sensing ion channel 5 (ASIC5) (Amiloride-sensitive cation channel 5) (Human intestine Na(+) channel) (HINaC)
KVYAENGLLEK

SEQ ID NO: 104705 - protein, 9 aa, Homo sapiens
  misc_feature (1)..(9): Table A1; Target 1863; HLA-B*44:03; TAF7L; ENSG00000102387; Transcription initiation factor TFIID subunit 7-like (Cancer/testis antigen 40) (CT40)
  misc_feature (1)..(9): (RNA polymerase II TBP-associated factor subunit Q) (TATA box-binding protein-associated factor 50 kDa) (Transcription initiation factor TFIID 50 kDa subunit)
AEFIESGQY

SEQ ID NO: 104706 - protein, 10 aa, Homo sapiens
  misc_feature (1)..(10): Table A1; Target 1864; HLA-A*11:01; TAF7L; ENSG00000102387; Transcription initiation factor TFIID subunit 7-like (Cancer/testis antigen 40) (CT40)
  misc_feature (1)..(10): (RNA polymerase II TBP-associated factor subunit Q) (TATA box-binding protein-associated factor 50 kDa) (Transcription initiation factor TFIID 50 kDa subunit)
ASTDPNIVRK

SEQ ID NO: 104707 - protein, 10 aa, Homo sapiens
  misc_feature (1)..(10): Table A1; Target 1865; HLA-A*11:01; TAF7L; ENSG00000102387; Transcription initiation factor TFIID subunit 7-like (Cancer/testis antigen 40) (CT40)
  misc_feature (1)..(10): (RNA polymerase II TBP-associated factor subunit Q) (TATA box-binding protein-associated factor 50 kDa) (Transcription initiation factor TFIID 50 kDa subunit)
STDPNIVRKK

SEQ ID NO: 104708 - protein, 9 aa, Homo sapiens
  misc_feature (1)..(9): Table A1; Target 1866; HLA-A*11:01; TAF7L; ENSG00000102387; Transcription initiation factor TFIID subunit 7-like (Cancer/testis antigen 40) (CT40)
  misc_feature (1)..(9): (RNA polymerase II TBP-associated factor subunit Q) (TATA box-binding protein-associated factor 50 kDa) (Transcription initiation factor TFIID 50 kDa subunit)
STDPNIVRK

SEQ ID NO: 104709 - protein, 11 aa, Homo sapiens
  misc_feature (1)..(11): Table A1; Target 1867; HLA-A*03:01; CRIS2; ENSG00000124490; Cysteine-rich secretory protein 2 (CRISP-2) (Cancer/testis antigen 36) (CT36) (Testis-specific protein TPX-1)
AVSPPASNMLK

SEQ ID NO: 104710 - protein, 11 aa, Homo sapiens
  misc_feature (1)..(11): Table A1; Target 1868; HLA-A*11:01; CRIS2; ENSG00000124490; Cysteine-rich secretory protein 2 (CRISP-2) (Cancer/testis antigen 36) (CT36) (Testis-specific protein TPX-1)
AVSPPASNMLK

SEQ ID NO: 104711 - protein, 8 aa, Homo sapiens
  misc_feature (1)..(8): Table A1; Target 1869; HLA-B*18:01; CRIS2; ENSG00000124490; Cysteine-rich secretory protein 2 (CRISP-2) (Cancer/testis antigen 36) (CT36) (Testis-specific protein TPX-1)
DEILDFVY

SEQ ID NO: 104712 - protein, 9 aa, Homo sapiens
  misc_feature (1)..(9): Table A1; Target 1870; HLA-B*51:01; CRIS2; ENSG00000124490; Cysteine-rich secretory protein 2 (CRISP-2) (Cancer/testis antigen 36) (CT36) (Testis-specific protein TPX-1)
DPTSWSSAI

SEQ ID NO: 104713 - protein, 10 aa, Homo sapiens
  misc_feature (1)..(10): Table A1; Target 1871; HLA-B*35:01; CRIS2; ENSG00000124490; Cysteine-rich secretory protein 2 (CRISP-2) (Cancer/testis antigen 36) (CT36) (Testis-specific protein TPX-1)
LPAEGKDPAF

SEQ ID NO: 104714 - protein, 9 aa, Homo sapiens
  misc_feature (1)..(9): Table A1; Target 1872; HLA-B*51:01; CRIS2; ENSG00000124490; Cysteine-rich secretory protein 2 (CRISP-2) (Cancer/testis antigen 36) (CT36) (Testis-specific protein TPX-1)
LPVLFLVTV

SEQ ID NO: 104715 - protein, 9 aa, Homo sapiens
  misc_feature (1)..(9): Table A1; Target 1873; HLA-C*01:02; CRIS2; ENSG00000124490; Cysteine-rich secretory protein 2 (CRISP-2) (Cancer/testis antigen 36) (CT36) (Testis-specific protein TPX-1)
VSPPASNML

SEQ ID NO: 104716 - protein, 9 aa, Homo sapiens
  misc_feature (1)..(9): Table A1; Target 1874; HLA-C*02:02; TAF7L; ENSG00000102387; Transcription initiation factor TFIID subunit 7-like (Cancer/testis antigen 40) (CT40)
  misc_feature (1)..(9): (RNA polymerase II TBP-associated factor subunit Q) (TATA box-binding protein-associated factor 50 kDa) (Transcription initiation factor TFIID 50 kDa subunit)
AEFIESGQY

SEQ ID NO: 104717 - protein, 10 aa, Homo sapiens
  misc_feature (1)..(10): Table A1; Target 1875; HLA-A*03:01; TAF7L; ENSG00000102387; Transcription initiation factor TFIID subunit 7-like (Cancer/testis antigen 40) (CT40)
  misc_feature (1)..(10): (RNA polymerase II TBP-associated factor subunit Q) (TATA box-binding protein-associated factor 50 kDa) (Transcription initiation factor TFIID 50 kDa subunit)
STDPNIVRKK

SEQ ID NO: 104718 - protein, 10 aa, Homo sapiens
  misc_feature (1)..(10): Table A1; Target 1876; HLA-B*44:03; CRIS2; ENSG00000124490; Cysteine-rich secretory protein 2 (CRISP-2) (Cancer/testis antigen 36) (CT36) (Testis-specific protein TPX-1)
REVTTNAQRW

SEQ ID NO: 104719 - protein, 9 aa, Homo sapiens
  misc_feature (1)..(9): Table A2; Target 1877; AFP; ENSG00000081051; HLA-A*02:07;
AADIIIGHL

SEQ ID NO: 104720 - protein, 9 aa, Homo sapiens
  misc_feature (1)..(9): Table A2; Target 1878; AFP; ENSG00000081051; HLA-A*68:02;
AADIIIGHL

SEQ ID NO: 104721 - protein, 9 aa, Homo sapiens
  misc_feature (1)..(9): Table A2; Target 1879; AFP; ENSG00000081051; HLA-B*38:01;
AADIIIGHL

SEQ ID NO: 104722 - protein, 9 aa, Homo sapiens
  misc_feature (1)..(9): Table A2; Target 1880; AFP; ENSG00000081051; HLA-B*40:01;
AADIIIGHL

SEQ ID NO: 104723 - protein, 9 aa, Homo sapiens
  misc_feature (1)..(9): Table A2; Target 1881; AFP; ENSG00000081051; HLA-C*02:02;
AADIIIGHL

SEQ ID NO: 104724 - protein, 9 aa, Homo sapiens
  misc_feature (1)..(9): Table A2; Target 1882; AFP; ENSG00000081051; HLA-C*05:01;
AADIIIGHL

SEQ ID NO: 104725 - protein, 9 aa, Homo sapiens
  misc_feature (1)..(9): Table A2; Target 1883; AFP; ENSG00000081051; HLA-A*68:01;
AATVTKELR

SEQ ID NO: 104726 - protein, 9 aa, Homo sapiens
  misc_feature (1)..(9): Table A2; Target 1884; AFP; ENSG00000081051; HLA-C*07:06;
AATVTKELR

SEQ ID NO: 104727 - protein, 8 aa, Homo sapiens
  misc_feature (1)..(8): Table A2; Target 1885; AFP; ENSG00000081051; HLA-A*32:01;
AATVTKEL

SEQ ID NO: 104728 - protein, 8 aa, Homo sapiens
  misc_feature (1)..(8): Table A2; Target 1886; AFP; ENSG00000081051; HLA-B*08:01;
AATVTKEL

SEQ ID NO: 104729 - protein, 8 aa, Homo sapiens
  misc_feature (1)..(8): Table A2; Target 1887; AFP; ENSG00000081051; HLA-B*46:01;
AATVTKEL

SEQ ID NO: 104730 - protein, 8 aa, Homo sapiens
  misc_feature (1)..(8): Table A2; Target 1888; AFP; ENSG00000081051; HLA-B*58:01;
AATVTKEL

SEQ ID NO: 104731 - protein, 8 aa, Homo sapiens
  misc_feature (1)..(8): Table A2; Target 1889; AFP; ENSG00000081051; HLA-C*01:02;
AATVTKEL

SEQ ID NO: 104732 - protein, 8 aa, Homo sapiens
  misc_feature (1)..(8): Table A2; Target 1890; AFP; ENSG00000081051; HLA-C*03:03;
AATVTKEL

SEQ ID NO: 104733 - protein, 8 aa, Homo sapiens
  misc_feature (1)..(8): Table A2; Target 1891; AFP; ENSG00000081051; HLA-C*03:04;
AATVTKEL

SEQ ID NO: 104734 - protein, 8 aa, Homo sapiens
  misc_feature (1)..(8): Table A2; Target 1892; AFP; ENSG00000081051; HLA-C*05:01;
AATVTKEL

SEQ ID NO: 104735 - protein, 8 aa, Homo sapiens
  misc_feature (1)..(8): Table A2; Target 1893; AFP; ENSG00000081051; HLA-C*12:03;
AATVTKEL

SEQ ID NO: 104736 - protein, 8 aa, Homo sapiens
  misc_feature (1)..(8): Table A2; Target 1894; AFP; ENSG00000081051; HLA-C*14:02;
AATVTKEL

SEQ ID NO: 104737 - protein, 8 aa, Homo sapiens
  misc_feature (1)..(8): Table A2; Target 1895; AFP; ENSG00000081051; HLA-C*16:01;
AATVTKEL

SEQ ID NO: 104738 - protein, 8 aa, Homo sapiens
  misc_feature (1)..(8): Table A2; Target 1896; AFP; ENSG00000081051; HLA-C*16:02;
AATVTKEL

SEQ ID NO: 104739 - protein, 8 aa, Homo sapiens
  misc_feature (1)..(8): Table A2; Target 1897; AFP; ENSG00000081051; HLA-C*16:04;
AATVTKEL

SEQ ID NO: 104740 - protein, 9 aa, Homo sapiens
  misc_feature (1)..(9): Table A2; Target 1898; AFP; ENSG00000081051; HLA-A*03:01;
ADFSGLLEK

SEQ ID NO: 104741 - protein, 9 aa, Homo sapiens
  misc_feature (1)..(9): Table A2; Target 1899; AFP; ENSG00000081051; HLA-A*03:02;
ADFSGLLEK

SEQ ID NO: 104742 - protein, 9 aa, Homo sapiens
  misc_feature (1)..(9): Table A2; Target 1900; AFP; ENSG00000081051; HLA-A*11:01;
ADFSGLLEK

SEQ ID NO: 104743 - protein, 9 aa, Homo sapiens
  misc_feature (1)..(9): Table A2; Target 1901; AFP; ENSG00000081051; HLA-B*27:02;
ADFSGLLEK

SEQ ID NO: 104744 - protein, 9 aa, Homo sapiens
  misc_feature (1)..(9): Table A2; Target 1902; AFP; ENSG00000081051; HLA-B*27:05;
ADFSGLLEK

SEQ ID NO: 104745 - protein, 8 aa, Homo sapiens
  misc_feature (1)..(8): Table A2; Target 1903; AFP; ENSG00000081051; HLA-A*30:01;
ADIIIGHL

SEQ ID NO: 104746 - protein, 8 aa, Homo sapiens
  misc_feature (1)..(8): Table A2; Target 1904; AFP; ENSG00000081051; HLA-B*37:01;
ADIIIGHL

SEQ ID NO: 104747 - protein, 8 aa, Homo sapiens
  misc_feature (1)..(8): Table A2; Target 1905; AFP; ENSG00000081051; HLA-B*40:02;
ADIIIGHL

SEQ ID NO: 104748 - protein, 8 aa, Homo sapiens
  misc_feature (1)..(8): Table A2; Target 1906; AFP; ENSG00000081051; HLA-B*44:02;
ADIIIGHL

SEQ ID NO: 104749 - protein, 8 aa, Homo sapiens
  misc_feature (1)..(8): Table A2; Target 1907; AFP; ENSG00000081051; HLA-B*37:01;
ADLATIFF

SEQ ID NO: 104750 - protein, 8 aa, Homo sapiens
  misc_feature (1)..(8): Table A2; Target 1908; AFP; ENSG00000081051; HLA-B*44:02;
AEEGQKLI

SEQ ID NO: 104751 - protein, 8 aa, Homo sapiens
  misc_feature (1)..(8): Table A2; Target 1909; AFP; ENSG00000081051; HLA-B*44:03;
AEEGQKLI

SEQ ID NO: 104752 - protein, 8 aa, Homo sapiens
  misc_feature (1)..(8): Table A2; Target 1910; AFP; ENSG00000081051; HLA-B*49:01;
AEEGQKLI

SEQ ID NO: 104753 - protein, 11 aa, Homo sapiens
  misc_feature (1)..(11): Table A2; Target 1911; AFP; ENSG00000081051; HLA-A*30:01;
AEISLADLATI

SEQ ID NO: 104754 - protein, 11 aa, Homo sapiens
  misc_feature (1)..(11): Table A2; Target 1912; AFP; ENSG00000081051; HLA-B*40:01;
AEISLADLATI

SEQ ID NO: 104755 - protein, 11 aa, Homo sapiens
  misc_feature (1)..(11): Table A2; Target 1913; AFP; ENSG00000081051; HLA-B*44:02;
AEISLADLATI

SEQ ID NO: 104756 - protein, 11 aa, Homo sapiens
  misc_feature (1)..(11): Table A2; Target 1914; AFP; ENSG00000081051; HLA-B*44:03;
AEISLADLATI

SEQ ID NO: 104757 - protein, 11 aa, Homo sapiens
  misc_feature (1)..(11): Table A2; Target 1915; AFP; ENSG00000081051; HLA-B*49:01;
AEISLADLATI

SEQ ID NO: 104758 - protein, 9 aa, Homo sapiens
  misc_feature (1)..(9): Table A2; Target 1916; AFP; ENSG00000081051; HLA-A*30:01;
AEISLADLA

SEQ ID NO: 104759 - protein, 9 aa, Homo sapiens
  misc_feature (1)..(9): Table A2; Target 1917; AFP; ENSG00000081051; HLA-B*40:01;
AEISLADLA

SEQ ID NO: 104760 - protein, 9 aa, Homo sapiens
  misc_feature (1)..(9): Table A2; Target 1918; AFP; ENSG00000081051; HLA-B*40:02;
AEISLADLA

SEQ ID NO: 104761 - protein, 9 aa, Homo sapiens
  misc_feature (1)..(9): Table A2; Target 1919; AFP; ENSG00000081051; HLA-B*49:01;
AEISLADLA

SEQ ID NO: 104762 - protein, 8 aa, Homo sapiens
  misc_feature (1)..(8): Table A2; Target 1920; AFP; ENSG00000081051; HLA-A*30:01;
AEISLADL

SEQ ID NO: 104763 - protein, 8 aa, Homo sapiens
  misc_feature (1)..(8): Table A2; Target 1921; AFP; ENSG00000081051; HLA-B*37:01;
AEISLADL

SEQ ID NO: 104764 - protein, 8 aa, Homo sapiens
  misc_feature (1)..(8): Table A2; Target 1922; AFP; ENSG00000081051; HLA-B*40:01;
AEISLADL

SEQ ID NO: 104765 - protein, 8 aa, Homo sapiens
  misc_feature (1)..(8): Table A2; Target 1923; AFP; ENSG00000081051; HLA-B*44:03;
AEISLADL

SEQ ID NO: 104766 - protein, 8 aa, Homo sapiens
  misc_feature (1)..(8): Table A2; Target 1924; AFP; ENSG00000081051; HLA-B*49:01;
AEISLADL

SEQ ID NO: 104767 - protein, 8 aa, Homo sapiens
  misc_feature (1)..(8): Table A2; Target 1925; AFP; ENSG00000081051; HLA-A*30:01;
AENAVECF

SEQ ID NO: 104768 - protein, 8 aa, Homo sapiens
  misc_feature (1)..(8): Table A2; Target 1926; AFP; ENSG00000081051; HLA-B*18:01;
AENAVECF

SEQ ID NO: 104769 - protein, 8 aa, Homo sapiens
  misc_feature (1)..(8): Table A2; Target 1927; AFP; ENSG00000081051; HLA-B*27:02;
AENAVECF

SEQ ID NO: 104770 - protein, 8 aa, Homo sapiens
  misc_feature (1)..(8): Table A2; Target 1928; AFP; ENSG00000081051; HLA-B*37:01;
AENAVECF

SEQ ID NO: 104771 - protein, 8 aa, Homo sapiens
  misc_feature (1)..(8): Table A2; Target 1929; AFP; ENSG00000081051; HLA-B*44:02;
AENAVECF

SEQ ID NO: 104772 - protein, 8 aa, Homo sapiens
  misc_feature (1)..(8): Table A2; Target 1930; AFP; ENSG00000081051; HLA-B*44:03;
AENAVECF

SEQ ID NO: 104773 - protein, 8 aa, Homo sapiens
  misc_feature (1)..(8): Table A2; Target 1931; AFP; ENSG00000081051; HLA-C*16:04;
AENAVECF

SEQ ID NO: 104774 - protein, 10 aa, Homo sapiens
  misc_feature (1)..(10): Table A2; Target 1932; AFP; ENSG00000081051; HLA-A*30:01;
AENDEKPEGL

SEQ ID NO: 104775 - protein, 10 aa, Homo sapiens
  misc_feature (1)..(10): Table A2; Target 1933; AFP; ENSG00000081051; HLA-B*27:02;
AENDEKPEGL

SEQ ID NO: 104776 - protein, 10 aa, Homo sapiens
  misc_feature (1)..(10): Table A2; Target 1934; AFP; ENSG00000081051; HLA-B*40:01;
AENDEKPEGL

SEQ ID NO: 104777 - protein, 10 aa, Homo sapiens
  misc_feature (1)..(10): Table A2; Target 1935; AFP; ENSG00000081051; HLA-B*44:02;
AENDEKPEGL

SEQ ID NO: 104778 - protein, 10 aa, Homo sapiens
  misc_feature (1)..(10): Table A2; Target 1936; AFP; ENSG00000081051; HLA-B*44:03;
AENDEKPEGL

SEQ ID NO: 104779 - protein, 10 aa, Homo sapiens
  misc_feature (1)..(10): Table A2; Target 1937; AFP; ENSG00000081051; HLA-C*16:04;
AENDEKPEGL

SEQ ID NO: 104780 - protein, 9 aa, Homo sapiens
  misc_feature (1)..(9): Table A2; Target 1938; AFP; ENSG00000081051; HLA-A*23:01;
AFSDDKFIF

SEQ ID NO: 104781 - protein, 9 aa, Homo sapiens
  misc_feature (1)..(9): Table A2; Target 1939; AFP; ENSG00000081051; HLA-A*29:02;
AFSDDKFIF

SEQ ID NO: 104782 - protein, 9 aa, Homo sapiens
  misc_feature (1)..(9): Table A2; Target 1940; AFP; ENSG00000081051; HLA-A*32:01;
ALQTMKQEF

SEQ ID NO: 104783 - protein, 9 aa, Homo sapiens
  misc_feature (1)..(9): Table A2; Target 1941; AFP; ENSG00000081051; HLA-B*15:01;
ALQTMKQEF

SEQ ID NO: 104784 - protein, 9 aa, Homo sapiens
  misc_feature (1)..(9): Table A2; Target 1942; AFP; ENSG00000081051; HLA-B*37:01;
ALQTMKQEF

SEQ ID NO: 104785 - protein, 9 aa, Homo sapiens
  misc_feature (1)..(9): Table A2; Target 1943; AFP; ENSG00000081051; HLA-C*14:02;
ALQTMKQEF

SEQ ID NO: 104786 - protein, 9 aa, Homo sapiens
  misc_feature (1)..(9): Table A2; Target 1944; AFP; ENSG00000081051; HLA-C*16:01;
ALQTMKQEF

SEQ ID NO: 104787 - protein, 11 aa, Homo sapiens
  misc_feature (1)..(11): Table A2; Target 1945; AFP; ENSG00000081051; HLA-B*56:01;
APQLTSSELMA

SEQ ID NO: 104788 - protein, 10 aa, Homo sapiens
  misc_feature (1)..(10): Table A2; Target 1946; AFP; ENSG00000081051; HLA-B*07:02;
APQLTSSELM

SEQ ID NO: 104789 - protein, 9 aa, Homo sapiens
  misc_feature (1)..(9): Table A2; Target 1947; AFP; ENSG00000081051; HLA-B*07:02;
APQLTSSEL

SEQ ID NO: 104790 - protein, 9 aa, Homo sapiens
  misc_feature (1)..(9): Table A2; Target 1948; AFP; ENSG00000081051; HLA-B*35:01;
APQLTSSEL

SEQ ID NO: 104791 - protein, 9 aa, Homo sapiens
  misc_feature (1)..(9): Table A2; Target 1949; AFP; ENSG00000081051; HLA-B*35:03;
APQLTSSEL

SEQ ID NO: 104792 - protein, 9 aa, Homo sapiens
  misc_feature (1)..(9): Table A2; Target 1950; AFP; ENSG00000081051; HLA-B*55:01;
APQLTSSEL

SEQ ID NO: 104793 - protein, 9 aa, Homo sapiens
  misc_feature (1)..(9): Table A2; Target 1951; AFP; ENSG00000081051; HLA-B*56:01;
APQLTSSEL

SEQ ID NO: 104794 - protein, 9 aa, Homo sapiens
  misc_feature (1)..(9): Table A2; Target 1952; AFP; ENSG00000081051; HLA-C*01:02;
APQLTSSEL

SEQ ID NO: 104795 - protein, 9 aa, Homo sapiens
  misc_feature (1)..(9): Table A2; Target 1953; AFP; ENSG00000081051; HLA-C*07:02;
APQLTSSEL

SEQ ID NO: 104796 - protein, 9 aa, Homo sapiens
  misc_feature (1)..(9): Table A2; Target 1954; AFP; ENSG00000081051; HLA-C*14:02;
APQLTSSEL

SEQ ID NO: 104797 - protein, 9 aa, Homo sapiens
  misc_feature (1)..(9): Table A2; Target 1955; AFP; ENSG00000081051; HLA-B*54:01;
APTILLWAA

SEQ ID NO: 104798 - protein, 9 aa, Homo sapiens
  misc_feature (1)..(9): Table A2; Target 1956; AFP; ENSG00000081051; HLA-B*55:01;
APTILLWAA

SEQ ID NO: 104799 - protein, 9 aa, Homo sapiens
  misc_feature (1)..(9): Table A2; Target 1957; AFP; ENSG00000081051; HLA-B*56:01;
APTILLWAA

SEQ ID NO: 104800 - protein, 10 aa, Homo sapiens
  misc_feature (1)..(10): Table A2; Target 1958; AFP; ENSG00000081051; HLA-A*03:01;
AQFVQEATYK

SEQ ID NO: 104801 - protein, 10 aa, Homo sapiens
  misc_feature (1)..(10): Table A2; Target 1959; AFP; ENSG00000081051; HLA-A*03:02;
AQFVQEATYK

SEQ ID NO: 104802 - protein, 10 aa, Homo sapiens
  misc_feature (1)..(10): Table A2; Target 1960; AFP; ENSG00000081051; HLA-A*11:01;
AQFVQEATYK

SEQ ID NO: 104803 - protein, 10 aa, Homo sapiens
  misc_feature (1)..(10): Table A2; Target 1961; AFP; ENSG00000081051; HLA-B*13:02;
AQFVQEATYK

SEQ ID NO: 104804 - protein, 10 aa, Homo sapiens
  misc_feature (1)..(10): Table A2; Target 1962; AFP; ENSG00000081051; HLA-B*27:02;
AQFVQEATYK

SEQ ID NO: 104805 - protein, 10 aa, Homo sapiens
  misc_feature (1)..(10): Table A2; Target 1963; AFP; ENSG00000081051; HLA-B*27:05;
AQFVQEATYK

SEQ ID NO: 104806 - protein, 9 aa, Homo sapiens
  misc_feature (1)..(9): Table A2; Target 1964; AFP; ENSG00000081051; HLA-A*25:01;
AQFVQEATY

SEQ ID NO: 104807 - protein, 9 aa, Homo sapiens
  misc_feature (1)..(9): Table A2; Target 1965; AFP; ENSG00000081051; HLA-A*26:01;
AQFVQEATY

SEQ ID NO: 104808 - protein, 9 aa, Homo sapiens
  misc_feature (1)..(9): Table A2; Target 1966; AFP; ENSG00000081051; HLA-A*29:02;
AQFVQEATY

SEQ ID NO: 104809 - protein, 9 aa, Homo sapiens
  misc_feature (1)..(9): Table A2; Target 1967; AFP; ENSG00000081051; HLA-A*30:02;
AQFVQEATY

SEQ ID NO: 104810 - protein, 9 aa, Homo sapiens
  misc_feature (1)..(9): Table A2; Target 1968; AFP; ENSG00000081051; HLA-A*32:01;
AQFVQEATY

SEQ ID NO: 104811 - protein, 9 aa, Homo sapiens
  misc_feature (1)..(9): Table A2; Target 1969; AFP; ENSG00000081051; HLA-B*13:02;
AQFVQEATY

SEQ ID NO: 104812 - protein, 9 aa, Homo sapiens
  misc_feature (1)..(9): Table A2; Target 1970; AFP; ENSG00000081051; HLA-B*15:01;
AQFVQEATY

SEQ ID NO: 104813 - protein, 9 aa, Homo sapiens
  misc_feature (1)..(9): Table A2; Target 1971; AFP; ENSG00000081051; HLA-B*15:03;
AQFVQEATY

SEQ ID NO: 104814 - protein, 9 aa, Homo sapiens
  misc_feature (1)..(9): Table A2; Target 1972; AFP; ENSG00000081051; HLA-B*18:01;
AQFVQEATY

SEQ ID NO: 104815 - protein, 9 aa, Homo sapiens
  misc_feature (1)..(9): Table A2; Target 1973; AFP; ENSG00000081051; HLA-B*27:02;
AQFVQEATY

SEQ ID NO: 104816 - protein, 9 aa, Homo sapiens
  misc_feature (1)..(9): Table A2; Target 1974; AFP; ENSG00000081051; HLA-B*27:05;
AQFVQEATY

SEQ ID NO: 104817 - protein, 9 aa, Homo sapiens
  misc_feature (1)..(9): Table A2; Target 1975; AFP; ENSG00000081051; HLA-B*35:01;
AQFVQEATY

SEQ ID NO: 104818 - protein, 9 aa, Homo sapiens
  misc_feature (1)..(9): Table A2; Target 1976; AFP; ENSG00000081051; HLA-B*37:01;
AQFVQEATY

SEQ ID NO: 104819 - protein, 9 aa, Homo sapiens
  misc_feature (1)..(9): Table A2; Target 1977; AFP; ENSG00000081051; HLA-B*39:01;
AQFVQEATY

SEQ ID NO: 104820 - protein, 9 aa, Homo sapiens
  misc_feature (1)..(9): Table A2; Target 1978; AFP; ENSG00000081051; HLA-B*44:02;
AQFVQEATY

SEQ ID NO: 104821 - protein, 9 aa, Homo sapiens
  misc_feature (1)..(9): Table A2; Target 1979; AFP; ENSG00000081051; HLA-B*44:03;
AQFVQEATY

SEQ ID NO: 104822 - protein, 9 aa, Homo sapiens
  misc_feature (1)..(9): Table A2; Target 1980; AFP; ENSG00000081051; HLA-B*46:01;
AQFVQEATY

SEQ ID NO: 104823 - protein, 9 aa, Homo sapiens
  misc_feature (1)..(9): Table A2; Target 1981; AFP; ENSG00000081051; HLA-B*58:01;
AQFVQEATY

SEQ ID NO: 104824 - protein, 9 aa, Homo sapiens
  misc_feature (1)..(9): Table A2; Target 1982; AFP; ENSG00000081051; HLA-C*02:02;
AQFVQEATY

SEQ ID NO: 104825 - protein, 9 aa, Homo sapiens
  misc_feature (1)..(9): Table A2; Target 1983; AFP; ENSG00000081051; HLA-C*07:04;
AQFVQEATY

SEQ ID NO: 104826 - protein, 9 aa, Homo sapiens
  misc_feature (1)..(9): Table A2; Target 1984; AFP; ENSG00000081051; HLA-C*12:03;
AQFVQEATY

SEQ ID NO: 104827 - protein, 9 aa, Homo sapiens
  misc_feature (1)..(9): Table A2; Target 1985; AFP; ENSG00000081051; HLA-C*14:02;
AQFVQEATY

SEQ ID NO: 104828 - protein, 9 aa, Homo sapiens
  misc_feature (1)..(9): Table A2; Target 1986; AFP; ENSG00000081051; HLA-C*16:01;
AQFVQEATY

SEQ ID NO: 104829 - protein, 9 aa, Homo sapiens
  misc_feature (1)..(9): Table A2; Target 1987; AFP; ENSG00000081051; HLA-C*16:02;
AQFVQEATY

SEQ ID NO: 104830 - protein, 9 aa, Homo sapiens
  misc_feature (1)..(9): Table A2; Target 1988; AFP; ENSG00000081051; HLA-C*16:04;
AQFVQEATY

SEQ ID NO: 104831 - protein, 8 aa, Homo sapiens
  misc_feature (1)..(8): Table A2; Target 1989; AFP; ENSG00000081051; HLA-B*13:02;
AQFVQEAT

SEQ ID NO: 104832 - protein, 8 aa, Homo sapiens
  misc_feature (1)..(8): Table A2; Target 1990; AFP; ENSG00000081051; HLA-B*15:01;
AQFVQEAT

SEQ ID NO: 104833 - protein, 9 aa, Homo sapiens
  misc_feature (1)..(9): Table A2; Target 1991; AFP; ENSG00000081051; HLA-B*13:02;
AQGVALQTM

SEQ ID NO: 104834 - protein, 9 aa, Homo sapiens
  misc_feature (1)..(9): Table A2; Target 1992; AFP; ENSG00000081051; HLA-B*15:01;
AQGVALQTM

SEQ ID NO: 104835 - protein, 9 aa, Homo sapiens
  misc_feature (1)..(9): Table A2; Target 1993; AFP; ENSG00000081051; HLA-B*15:03;
AQGVALQTM

SEQ ID NO: 104836 - protein, 9 aa, Homo sapiens
  misc_feature (1)..(9): Table A2; Target 1994; AFP; ENSG00000081051; HLA-B*27:05;
AQGVALQTM

SEQ ID NO: 104837 - protein, 9 aa, Homo sapiens
  misc_feature (1)..(9): Table A2; Target 1995; AFP; ENSG00000081051; HLA-B*37:01;
AQGVALQTM

SEQ ID NO: 104838 - protein, 9 aa, Homo sapiens
  misc_feature (1)..(9): Table A2; Target 1996; AFP; ENSG00000081051; HLA-C*01:02;
AQGVALQTM

SEQ ID NO: 104839 - protein, 9 aa, Homo sapiens
  misc_feature (1)..(9): Table A2; Target 1997; AFP; ENSG00000081051; HLA-C*07:04;
AQGVALQTM

SEQ ID NO: 104840 - protein, 9 aa, Homo sapiens
  misc_feature (1)..(9): Table A2; Target 1998; AFP; ENSG00000081051; HLA-C*14:02;
AQGVALQTM

SEQ ID NO: 104841 - protein, 8 aa, Homo sapiens
  misc_feature (1)..(8): Table A2; Target 1999; AFP; ENSG00000081051; HLA-B*13:02;
AQGVALQT

SEQ ID NO: 104842 - protein, 9 aa, Homo sapiens
  misc_feature (1)..(9): Table A2; Target 2000; AFP; ENSG00000081051; HLA-A*11:01;
ASFVHEYSR

SEQ ID NO: 104843 - protein, 9 aa, Homo sapiens
  misc_feature (1)..(9): Table A2; Target 2001; AFP; ENSG00000081051; HLA-A*31:01;
ASFVHEYSR

SEQ ID NO: 104844 - protein, 9 aa, Homo sapiens
  misc_feature (1)..(9): Table A2; Target 2002; AFP; ENSG00000081051; HLA-B*57:01;
ASFVHEYSR

SEQ ID NO: 104845 - protein, 9 aa, Homo sapiens
  misc_feature (1)..(9): Table A2; Target 2003; AFP; ENSG00000081051; HLA-C*07:06;
ASFVHEYSR

SEQ ID NO: 104846 - protein, 9 aa, Homo sapiens
  misc_feature (1)..(9): Table A2; Target 2004; AFP; ENSG00000081051; HLA-A*68:02;
ATIFFAQFV

SEQ ID NO: 104847 - protein, 11 aa, Homo sapiens
  misc_feature (1)..(11): Table A2; Target 2005; AFP; ENSG00000081051; HLA-A*03:01;
ATYKEVSKMVK

SEQ ID NO: 104848 - protein, 11 aa, Homo sapiens
  misc_feature (1)..(11): Table A2; Target 2006; AFP; ENSG00000081051; HLA-A*03:02;
ATYKEVSKMVK

SEQ ID NO: 104849 - protein, 11 aa, Homo sapiens
  misc_feature (1)..(11): Table A2; Target 2007; AFP; ENSG00000081051; HLA-A*11:01;
ATYKEVSKMVK

SEQ ID NO: 104850 - protein, 11 aa, Homo sapiens
  misc_feature (1)..(11): Table A2; Target 2008; AFP; ENSG00000081051; HLA-A*31:01;
ATYKEVSKMVK

SEQ ID NO: 104851 - protein, 9 aa, Homo sapiens
  misc_feature (1)..(9): Table A2; Target 2009; AFP; ENSG00000081051; HLA-A*03:01;
ATYKEVSKM

SEQ ID NO: 104852 - protein, 9 aa, Homo sapiens
  misc_feature (1)..(9): Table A2; Target 2010; AFP; ENSG00000081051; HLA-A*03:02;
ATYKEVSKM

SEQ ID NO: 104853 - protein, 9 aa, Homo sapiens
  misc_feature (1)..(9): Table A2; Target 2011; AFP; ENSG00000081051; HLA-A*11:01;
ATYKEVSKM

SEQ ID NO: 104854 - protein, 9 aa, Homo sapiens
  misc_feature (1)..(9): Table A2; Target 2012; AFP; ENSG00000081051; HLA-A*25:01;
ATYKEVSKM

SEQ ID NO: 104855 - protein, 9 aa, Homo sapiens
  misc_feature (1)..(9): Table A2; Target 2013; AFP; ENSG00000081051; HLA-A*26:01;
ATYKEVSKM

SEQ ID NO: 104856 - protein, 9 aa, Homo sapiens
  misc_feature (1)..(9): Table A2; Target 2014; AFP; ENSG00000081051; HLA-A*31:01;
ATYKEVSKM

SEQ ID NO: 104857 - protein, 9 aa, Homo sapiens
  misc_feature (1)..(9): Table A2; Target 2015; AFP; ENSG00000081051; HLA-A*32:01;
ATYKEVSKM

SEQ ID NO: 104858 - protein, 9 aa, Homo sapiens
  misc_feature (1)..(9): Table A2; Target 2016; AFP; ENSG00000081051; HLA-B*15:01;
ATYKEVSKM

SEQ ID NO: 104859 - protein, 9 aa, Homo sapiens
  misc_feature (1)..(9): Table A2; Target 2017; AFP; ENSG00000081051; HLA-B*40:02;
ATYKEVSKM

SEQ ID NO: 104860 - protein, 9 aa, Homo sapiens
  misc_feature (1)..(9): Table A2; Target 2018; AFP; ENSG00000081051; HLA-B*58:01;
ATYKEVSKM

SEQ ID NO: 104861 - protein, 9 aa, Homo sapiens
  misc_feature (1)..(9): Table A2; Target 2019; AFP; ENSG00000081051; HLA-C*02:02;
ATYKEVSKM

SEQ ID NO: 104862 - protein, 9 aa, Homo sapiens
  misc_feature (1)..(9): Table A2; Target 2020; AFP; ENSG00000081051; HLA-C*12:03;
ATYKEVSKM

SEQ ID NO: 104863 - protein, 9 aa, Homo sapiens
  misc_feature (1)..(9): Table A2; Target 2021; AFP; ENSG00000081051; HLA-C*16:02;
ATYKEVSKM

SEQ ID NO: 104864 - protein, 8 aa, Homo sapiens
  misc_feature (1)..(8): Table A2; Target 2022; AFP; ENSG00000081051; HLA-A*11:01;
ATYKEVSK

SEQ ID NO: 104865 - protein, 9 aa, Homo sapiens
  misc_feature (1)..(9): Table A2; Target 2023; AFP; ENSG00000081051; HLA-A*02:07;
AVIADFSGL

SEQ ID NO: 104866 - protein, 9 aa, Homo sapiens
  misc_feature (1)..(9): Table A2; Target 2024; AFP; ENSG00000081051; HLA-A*25:01;
AVIADFSGL

SEQ ID NO: 104867 - protein, 9 aa, Homo sapiens
  misc_feature (1)..(9): Table A2; Target 2025; AFP; ENSG00000081051; HLA-A*26:01;
AVIADFSGL

SEQ ID NO: 104868 - protein, 9 aa, Homo sapiens
  misc_feature (1)..(9): Table A2; Target 2026; AFP; ENSG00000081051; HLA-B*15:01;
AVIADFSGL

SEQ ID NO: 104869 - protein, 9 aa, Homo sapiens
  misc_feature (1)..(9): Table A2; Target 2027; AFP; ENSG00000081051; HLA-B*40:01;
AVIADFSGL

SEQ ID NO: 104870 - protein, 9 aa, Homo sapiens
  misc_feature (1)..(9): Table A2; Target 2028; AFP; ENSG00000081051; HLA-B*46:01;
AVIADFSGL

SEQ ID NO: 104871 - protein, 9 aa, Homo sapiens
  misc_feature (1)..(9): Table A2; Target 2029; AFP; ENSG00000081051; HLA-B*58:01;
AVIADFSGL

SEQ ID NO: 104872 - protein, 9 aa, Homo sapiens
  misc_feature (1)..(9): Table A2; Target 2030; AFP; ENSG00000081051; HLA-C*01:02;
AVIADFSGL

SEQ ID NO: 104873 - protein, 9 aa, Homo sapiens
  misc_feature (1)..(9): Table A2; Target 2031; AFP; ENSG00000081051; HLA-C*03:03;
AVIADFSGL

SEQ ID NO: 104874 - protein, 9 aa, Homo sapiens
  misc_feature (1)..(9): Table A2; Target 2032; AFP; ENSG00000081051; HLA-C*03:04;
AVIADFSGL

SEQ ID NO: 104875 - protein, 9 aa, Homo sapiens
  misc_feature (1)..(9): Table A2; Target 2033; AFP; ENSG00000081051; HLA-C*16:04;
AVIADFSGL

SEQ ID NO: 104876 - protein, 9 aa, Homo sapiens
  misc_feature (1)..(9): Table A2; Target 2034; AFP; ENSG00000081051; HLA-A*03:01;
AVMKNFGTR

SEQ ID NO: 104877 - protein, 9 aa, Homo sapiens
  misc_feature (1)..(9): Table A2; Target 2035; AFP; ENSG00000081051; HLA-A*03:02;
AVMKNFGTR

SEQ ID NO: 104878 - protein, 9 aa, Homo sapiens
  misc_feature (1)..(9): Table A2; Target 2036; AFP; ENSG00000081051; HLA-A*11:01;
AVMKNFGTR

SEQ ID NO: 104879 - protein, 9 aa, Homo sapiens
  misc_feature (1)..(9): Table A2; Target 2037; AFP; ENSG00000081051; HLA-A*31:01;
AVMKNFGTR

SEQ ID NO: 104880 - protein, 9 aa, Homo sapiens
  misc_feature (1)..(9): Table A2; Target 2038; AFP; ENSG00000081051; HLA-A*33:03;
AVMKNFGTR

SEQ ID NO: 104881 - protein, 9 aa, Homo sapiens
  misc_feature (1)..(9): Table A2; Target 2039; AFP; ENSG00000081051; HLA-A*68:01;
AVMKNFGTR

SEQ ID NO: 104882 - protein, 9 aa, Homo sapiens
  misc_feature (1)..(9): Table A2; Target 2040; AFP; ENSG00000081051; HLA-C*07:06;
AVMKNFGTR

SEQ ID NO: 104883 - protein, 10 aa, Homo sapiens
  misc_feature (1)..(10): Table A2; Target 2041; AFP; ENSG00000081051; HLA-A*03:01;
AVSVILRVAK

SEQ ID NO: 104884 - protein, 10 aa, Homo sapiens
  misc_feature (1)..(10): Table A2; Target 2042; AFP; ENSG00000081051; HLA-A*03:02;
AVSVILRVAK

SEQ ID NO: 104885 - protein, 10 aa, Homo sapiens
  misc_feature (1)..(10): Table A2; Target 2043; AFP; ENSG00000081051; HLA-A*11:01;
AVSVILRVAK

SEQ ID NO: 104886 - protein, 9 aa, Homo sapiens
  misc_feature (1)..(9): Table A2; Target 2044; AFP; ENSG00000081051; HLA-A*32:01;
AVSVILRVA

SEQ ID NO: 104887 - protein, 9 aa, Homo sapiens
  misc_feature (1)..(9): Table A2; Target 2045; AFP; ENSG00000081051; HLA-B*56:01;
AVSVILRVA

SEQ ID NO: 104888 - protein, 8 aa, Homo sapiens
  misc_feature (1)..(8): Table A2; Target 2046; AFP; ENSG00000081051; HLA-A*02:03;
AVSVILRV

SEQ ID NO: 104889 - protein, 8 aa, Homo sapiens
  misc_feature (1)..(8): Table A2; Target 2047; AFP; ENSG00000081051; HLA-B*13:02;
AVSVILRV

SEQ ID NO: 104890 - protein, 8 aa, Homo sapiens
  misc_feature (1)..(8): Table A2; Target 2048; AFP; ENSG00000081051; HLA-B*37:01;
AVSVILRV

SEQ ID NO: 104891 - protein, 10 aa, Homo sapiens
  misc_feature (1)..(10): Table A2; Target 2049; AFP; ENSG00000081051; HLA-C*04:01;
AYEEDRETFM

SEQ ID NO: 104892 - protein, 9 aa, Homo sapiens
  misc_feature (1)..(9): Table A2; Target 2050; AFP; ENSG00000081051; HLA-A*23:01;
AYEEDRETF

SEQ ID NO: 104893 - protein, 9 aa, Homo sapiens
  misc_feature (1)..(9): Table A2; Target 2051; AFP; ENSG00000081051; HLA-A*24:02;
AYEEDRETF

SEQ ID NO: 104894 - protein, 9 aa, Homo sapiens
  misc_feature (1)..(9): Table A2; Target 2052; AFP; ENSG00000081051; HLA-B*38:01;
AYEEDRETF

SEQ ID NO: 104895 - protein, 9 aa, Homo sapiens
  misc_feature (1)..(9): Table A2; Target 2053; AFP; ENSG00000081051; HLA-B*55:01;
AYEEDRETF

SEQ ID NO: 104896 - protein, 9 aa, Homo sapiens
  misc_feature (1)..(9): Table A2; Target 2054; AFP; ENSG00000081051; HLA-C*04:01;
AYEEDRETF

SEQ ID NO: 104897 - protein, 9 aa, Homo sapiens
  misc_feature (1)..(9): Table A2; Target 2055; AFP; ENSG00000081051; HLA-C*14:02;
AYEEDRETF

SEQ ID NO: 104898 - protein, 9 aa, Homo sapiens
  misc_feature (1)..(9): Table A2; Target 2056; AFP; ENSG00000081051; HLA-A*23:01;
AYTKKAPQL

SEQ ID NO: 104899 - protein, 9 aa, Homo sapiens
  misc_feature (1)..(9): Table A2; Target 2057; AFP; ENSG00000081051; HLA-A*24:02;
AYTKKAPQL

SEQ ID NO: 104900 - protein, 9 aa, Homo sapiens
  misc_feature (1)..(9): Table A2; Target 2058; AFP; ENSG00000081051; HLA-C*14:02;
AYTKKAPQL

SEQ ID NO: 104901 - protein, 9 aa, Homo sapiens
  misc_feature (1)..(9): Table A2; Target 2059; AFP; ENSG00000081051; HLA-C*16:01;
AYTKKAPQL

SEQ ID NO: 104902 - protein, 9 aa, Homo sapiens
  misc_feature (1)..(9): Table A2; Target 2060; AFP; ENSG00000081051; HLA-C*14:02;
CFQTKAATV

SEQ ID NO: 104903 - protein, 11 aa, Homo sapiens
  misc_feature (1)..(11): Table A2; Target 2061; AFP; ENSG00000081051; HLA-A*01:01;
CLQDGEKIMSY

SEQ ID NO: 104904 - protein, 11 aa, Homo sapiens
  misc_feature (1)..(11): Table A2; Target 2062; AFP; ENSG00000081051; HLA-A*03:01;
CLQDGEKIMSY

SEQ ID NO: 104905 - protein, 11 aa, Homo sapiens
  misc_feature (1)..(11): Table A2; Target 2063; AFP; ENSG00000081051; HLA-A*03:02;
CLQDGEKIMSY

SEQ ID NO: 104906 - protein, 11 aa, Homo sapiens
  misc_feature (1)..(11): Table A2; Target 2064; AFP; ENSG00000081051; HLA-A*25:01;
CLQDGEKIMSY

SEQ ID NO: 104907 - protein, 11 aa, Homo sapiens
  misc_feature (1)..(11): Table A2; Target 2065; AFP; ENSG00000081051; HLA-A*26:01;
CLQDGEKIMSY

SEQ ID NO: 104908 - protein, 11 aa, Homo sapiens
  misc_feature (1)..(11): Table A2; Target 2066; AFP; ENSG00000081051; HLA-A*30:02;
CLQDGEKIMSY

SEQ ID NO: 104909 - protein, 11 aa, Homo sapiens
  misc_feature (1)..(11): Table A2; Target 2067; AFP; ENSG00000081051; HLA-A*32:01;
CLQDGEKIMSY

SEQ ID NO: 104910 - protein, 11 aa, Homo sapiens
  misc_feature (1)..(11): Table A2; Target 2068; AFP; ENSG00000081051; HLA-B*15:01;
CLQDGEKIMSY

SEQ ID NO: 104911 - protein, 11 aa, Homo sapiens
  misc_feature (1)..(11): Table A2; Target 2069; AFP; ENSG00000081051; HLA-C*07:04;
CQAQGVALQTM

SEQ ID NO: 104912 - protein, 8 aa, Homo sapiens
  misc_feature (1)..(8): Table A2; Target 2070; AFP; ENSG00000081051; HLA-B*15:01;
CQAQGVAL

SEQ ID NO: 104913 - protein, 8 aa, Homo sapiens
  misc_feature (1)..(8): Table A2; Target 2071; AFP; ENSG00000081051; HLA-B*27:05;
CQAQGVAL

SEQ ID NO: 104914 - protein, 8 aa, Homo sapiens
  misc_feature (1)..(8): Table A2; Target 2072; AFP; ENSG00000081051; HLA-B*39:01;
CQAQGVAL

SEQ ID NO: 104915 - protein, 8 aa, Homo sapiens
  misc_feature (1)..(8): Table A2; Target 2073; AFP; ENSG00000081051; HLA-C*03:04;
CQAQGVAL

SEQ ID NO: 104916 - protein, 9 aa, Homo sapiens
  misc_feature (1)..(9): Table A2; Target 2074; AFP; ENSG00000081051; HLA-B*38:01;
CQDKGEEEL

SEQ ID NO: 104917 - protein, 9 aa, Homo sapiens
  misc_feature (1)..(9): Table A2; Target 2075; AFP; ENSG00000081051; HLA-B*39:01;
CQDKGEEEL

SEQ ID NO: 104918 - protein, 10 aa, Homo sapiens
  misc_feature (1)..(10): Table A2; Target 2076; AFP; ENSG00000081051; HLA-A*03:02;
CSQQDTLSNK

SEQ ID NO: 104919 - protein, 10 aa, Homo sapiens
  misc_feature (1)..(10): Table A2; Target 2077; AFP; ENSG00000081051; HLA-A*11:01;
CSQQDTLSNK

SEQ ID NO: 104920 - protein, 10 aa, Homo sapiens
  misc_feature (1)..(10): Table A2; Target 2078; AFP; ENSG00000081051; HLA-B*27:02;
CSQQDTLSNK

SEQ ID NO: 104921 - protein, 9 aa, Homo sapiens
  misc_feature (1)..(9): Table A2; Target 2079; AFP; ENSG00000081051; HLA-A*33:01;
DALTAIEKP

SEQ ID NO: 104922 - protein, 8 aa, Homo sapiens
  misc_feature (1)..(8): Table A2; Target 2080; AFP; ENSG00000081051; HLA-A*33:01;
DALTAIEK

SEQ ID NO: 104923 - protein, 8 aa, Homo sapiens
  misc_feature (1)..(8): Table A2; Target 2081; AFP; ENSG00000081051; HLA-B*51:01;
DALTAIEK

SEQ ID NO: 104924 - protein, 9 aa, Homo sapiens
  misc_feature (1)..(9): Table A2; Target 2082; AFP; ENSG00000081051; HLA-B*18:01;
DEKPEGLSP

SEQ ID NO: 104925 - protein, 9 aa, Homo sapiens
  misc_feature (1)..(9): Table A2; Target 2083; AFP; ENSG00000081051; HLA-B*40:02;
DEKPEGLSP

SEQ ID NO: 104926 - protein, 9 aa, Homo sapiens
  misc_feature (1)..(9): Table A2; Target 2084; AFP; ENSG00000081051; HLA-A*23:01;
DETYVPPAF

SEQ ID NO: 104927 - protein, 9 aa, Homo sapiens
  misc_feature (1)..(9): Table A2; Target 2085; AFP; ENSG00000081051; HLA-A*25:01;
DETYVPPAF

SEQ ID NO: 104928 - protein, 9 aa, Homo sapiens
  misc_feature (1)..(9): Table A2; Target 2086; AFP; ENSG00000081051; HLA-A*30:01;
DETYVPPAF

SEQ ID NO: 104929 - protein, 9 aa, Homo sapiens
  misc_feature (1)..(9): Table A2; Target 2087; AFP; ENSG00000081051; HLA-B*18:01;
DETYVPPAF

SEQ ID NO: 104930 - protein, 9 aa, Homo sapiens
  misc_feature (1)..(9): Table A2; Target 2088; AFP; ENSG00000081051; HLA-B*27:02;
DETYVPPAF

SEQ ID NO: 104931 - protein, 9 aa, Homo sapiens
  misc_feature (1)..(9): Table A2; Target 2089; AFP; ENSG00000081051; HLA-B*35:01;
DETYVPPAF

SEQ ID NO: 104932 - protein, 9 aa, Homo sapiens
  misc_feature (1)..(9): Table A2; Target 2090; AFP; ENSG00000081051; HLA-B*40:01;
DETYVPPAF

SEQ ID NO: 104933 - protein, 9 aa, Homo sapiens
  misc_feature (1)..(9): Table A2; Target 2091; AFP; ENSG00000081051; HLA-B*44:02;
DETYVPPAF

SEQ ID NO: 104934 - protein, 9 aa, Homo sapiens
  misc_feature (1)..(9): Table A2; Target 2092; AFP; ENSG00000081051; HLA-B*44:03;
DETYVPPAF

SEQ ID NO: 104935 - protein, 9 aa, Homo sapiens
  misc_feature (1)..(9): Table A2; Target 2093; AFP; ENSG00000081051; HLA-C*16:04;
DETYVPPAF

SEQ ID NO: 104936 - protein, 8 aa, Homo sapiens
  misc_feature (1)..(8): Table A2; Target 2094; AFP; ENSG00000081051; HLA-B*18:01;
DETYVPPA

SEQ ID NO: 104937 - protein, 10 aa, Homo sapiens
  misc_feature (1)..(10): Table A2; Target 2095; AFP; ENSG00000081051; HLA-A*33:01;
DFNQFSSGEK

SEQ ID NO: 104938 - protein, 9 aa, Homo sapiens
  misc_feature (1)..(9): Table A2; Target 2096; AFP; ENSG00000081051; HLA-B*51:01;
DGEKIMSYI

SEQ ID NO: 104939 - protein, 8 aa, Homo sapiens
  misc_feature (1)..(8): Table A2; Target 2097; AFP; ENSG00000081051; HLA-B*18:01;
DGEKIMSY

SEQ ID NO: 104940 - protein, 8 aa, Homo sapiens
  misc_feature (1)..(8): Table A2; Target 2098; AFP; ENSG00000081051; HLA-C*07:01;
DGEKIMSY

SEQ ID NO: 104941 - protein, 11 aa, Homo sapiens
  misc_feature (1)..(11): Table A2; Target 2099; AFP; ENSG00000081051; HLA-A*68:02;
DLATIFFAQFV

SEQ ID NO: 104942 - protein, 10 aa, Homo sapiens
  misc_feature (1)..(10): Table A2; Target 2100; AFP; ENSG00000081051; HLA-A*25:01;
DLATIFFAQF

SEQ ID NO: 104943 - protein, 10 aa, Homo sapiens
  misc_feature (1)..(10): Table A2; Target 2101; AFP; ENSG00000081051; HLA-A*26:01;
DLATIFFAQF

SEQ ID NO: 104944 - protein, 9 aa, Homo sapiens
  misc_feature (1)..(9): Table A2; Target 2102; AFP; ENSG00000081051; HLA-B*51:01;
DSYQCTAEI

SEQ ID NO: 104945 - protein, 9 aa, Homo sapiens
  misc_feature (1)..(9): Table A2; Target 2103; AFP; ENSG00000081051; HLA-A*33:01;
DTLSNKITE

SEQ ID NO: 104946 - protein, 9 aa, Homo sapiens
  misc_feature (1)..(9): Table A2; Target 2104; AFP; ENSG00000081051; HLA-A*33:01;
EATYKEVSK

SEQ ID NO: 104947 - protein, 9 aa, Homo sapiens
  misc_feature (1)..(9): Table A2; Target 2105; AFP; ENSG00000081051; HLA-A*33:03;
EATYKEVSK

SEQ ID NO: 104948 - protein, 9 aa, Homo sapiens
  misc_feature (1)..(9): Table A2; Target 2106; AFP; ENSG00000081051; HLA-A*68:01;
EATYKEVSK

SEQ ID NO: 104949 - protein, 9 aa, Homo sapiens
  misc_feature (1)..(9): Table A2; Target 2107; AFP; ENSG00000081051; HLA-C*07:06;
EATYKEVSK

SEQ ID NO: 104950 - protein, 10 aa, Homo sapiens
  misc_feature (1)..(10): Table A2; Target 2108; AFP; ENSG00000081051; HLA-A*25:01;
EAVIADFSGL

SEQ ID NO: 104951 - protein, 10 aa, Homo sapiens
  misc_feature (1)..(10): Table A2; Target 2109; AFP; ENSG00000081051; HLA-A*26:01;
EAVIADFSGL

SEQ ID NO: 104952 - protein, 11 aa, Homo sapiens
  misc_feature (1)..(11): Table A2; Target 2110; AFP; ENSG00000081051; HLA-A*26:01;
EAYEEDRETFM

SEQ ID NO: 104953 - protein, 10 aa, Homo sapiens
  misc_feature (1)..(10): Table A2; Target 2111; AFP; ENSG00000081051; HLA-A*25:01;
EAYEEDRETF

SEQ ID NO: 104954 - protein, 10 aa, Homo sapiens
  misc_feature (1)..(10): Table A2; Target 2112; AFP; ENSG00000081051; HLA-A*26:01;
EAYEEDRETF

SEQ ID NO: 104955 - protein, 10 aa, Homo sapiens
  misc_feature (1)..(10): Table A2; Target 2113; AFP; ENSG00000081051; HLA-A*33:03;
EAYEEDRETF

SEQ ID NO: 104956 - protein, 10 aa, Homo sapiens
  misc_feature (1)..(10): Table A2; Target 2114; AFP; ENSG00000081051; HLA-B*15:01;
EAYEEDRETF

SEQ ID NO: 104957 - protein, 10 aa, Homo sapiens
  misc_feature (1)..(10): Table A2; Target 2115; AFP; ENSG00000081051; HLA-B*15:03;
EAYEEDRETF

SEQ ID NO: 104958 - protein, 10 aa, Homo sapiens
  misc_feature (1)..(10): Table A2; Target 2116; AFP; ENSG00000081051; HLA-B*27:02;
EAYEEDRETF

SEQ ID NO: 104959 - protein, 10 aa, Homo sapiens
  misc_feature (1)..(10): Table A2; Target 2117; AFP; ENSG00000081051; HLA-B*35:01;
EAYEEDRETF

SEQ ID NO: 104960 - protein, 10 aa, Homo sapiens
  misc_feature (1)..(10): Table A2; Target 2118; AFP; ENSG00000081051; HLA-B*35:03;
EAYEEDRETF

SEQ ID NO: 104961 - protein, 10 aa, Homo sapiens
  misc_feature (1)..(10): Table A2; Target 2119; AFP; ENSG00000081051; HLA-B*38:01;
EAYEEDRETF

SEQ ID NO: 104962 - protein, 10 aa, Homo sapiens
  misc_feature (1)..(10): Table A2; Target 2120; AFP; ENSG00000081051; HLA-B*46:01;
EAYEEDRETF

SEQ ID NO: 104963 - protein, 10 aa, Homo sapiens
  misc_feature (1)..(10): Table A2; Target 2121; AFP; ENSG00000081051; HLA-B*51:01;
EAYEEDRETF

SEQ ID NO: 104964 - protein, 10 aa, Homo sapiens
  misc_feature (1)..(10): Table A2; Target 2122; AFP; ENSG00000081051; HLA-B*55:01;
EAYEEDRETF

SEQ ID NO: 104965 - protein, 10 aa, Homo sapiens
  misc_feature (1)..(10): Table A2; Target 2123; AFP; ENSG00000081051; HLA-B*57:01;
EAYEEDRETF

SEQ ID NO: 104966 - protein, 10 aa, Homo sapiens
  misc_feature (1)..(10): Table A2; Target 2124; AFP; ENSG00000081051; HLA-B*58:01;
EAYEEDRETF

SEQ ID NO: 104967 - protein, 10 aa, Homo sapiens
  misc_feature (1)..(10): Table A2; Target 2125; AFP; ENSG00000081051; HLA-C*02:02;
EAYEEDRETF

SEQ ID NO: 104968 - protein, 10 aa, Homo sapiens
  misc_feature (1)..(10): Table A2; Target 2126; AFP; ENSG00000081051; HLA-C*03:03;
EAYEEDRETF

SEQ ID NO: 104969 - protein, 10 aa, Homo sapiens
  misc_feature (1)..(10): Table A2; Target 2127; AFP; ENSG00000081051; HLA-C*05:01;
EAYEEDRETF

SEQ ID NO: 104970 - protein, 10 aa, Homo sapiens
  misc_feature (1)..(10): Table A2; Target 2128; AFP; ENSG00000081051; HLA-C*07:06;
EAYEEDRETF

SEQ ID NO: 104971 - protein, 10 aa, Homo sapiens
  misc_feature (1)..(10): Table A2; Target 2129; AFP; ENSG00000081051; HLA-C*16:04;
EAYEEDRETF

SEQ ID NO: 104972 - protein, 11 aa, Homo sapiens
  misc_feature (1)..(11): Table A2; Target 2130; AFP; ENSG00000081051; HLA-B*44:02;
EEDRETFMNKF

SEQ ID NO: 104973 - protein, 11 aa, Homo sapiens
  misc_feature (1)..(11): Table A2; Target 2131; AFP; ENSG00000081051; HLA-B*44:03;
EEDRETFMNKF

SEQ ID NO: 104974 - protein, 9 aa, Homo sapiens
  misc_feature (1)..(9): Table A2; Target 2132; AFP; ENSG00000081051; HLA-B*44:02;
EEGQKLISK

SEQ ID NO: 104975 - protein, 9 aa, Homo sapiens
  misc_feature (1)..(9): Table A2; Target 2133; AFP; ENSG00000081051; HLA-B*44:03;
EEGQKLISK

SEQ ID NO: 104976 - protein, 11 aa, Homo sapiens
  misc_feature (1)..(11): Table A2; Target 2134; AFP; ENSG00000081051; HLA-B*44:02;
EEQLEAVIADF

SEQ ID NO: 104977 - protein, 11 aa, Homo sapiens
  misc_feature (1)..(11): Table A2; Target 2135; AFP; ENSG00000081051; HLA-B*44:03;
EEQLEAVIADF

SEQ ID NO: 104978 - protein, 11 aa, Homo sapiens
  misc_feature (1)..(11): Table A2; Target 2136; AFP; ENSG00000081051; HLA-A*68:02;
EGAADIIIGHL

SEQ ID NO: 104979 - protein, 10 aa, Homo sapiens
  misc_feature (1)..(10): Table A2; Target 2137; AFP; ENSG00000081051; HLA-A*68:01;
EGAADIIIGH

SEQ ID NO: 104980 - protein, 10 aa, Homo sapiens
  misc_feature (1)..(10): Table A2; Target 2138; AFP; ENSG00000081051; HLA-C*07:06;
EGAADIIIGH

SEQ ID NO: 104981 - protein, 9 aa, Homo sapiens
  misc_feature (1)..(9): Table A2; Target 2139; AFP; ENSG00000081051; HLA-A*33:01;
EGLSPNLNR

SEQ ID NO: 104982 - protein, 9 aa, Homo sapiens
  misc_feature (1)..(9): Table A2; Target 2140; AFP; ENSG00000081051; HLA-A*33:03;
EGLSPNLNR

SEQ ID NO: 104983 - protein, 9 aa, Homo sapiens
  misc_feature (1)..(9): Table A2; Target 2141; AFP; ENSG00000081051; HLA-A*68:01;
EGLSPNLNR

SEQ ID NO: 104984 - protein, 9 aa, Homo sapiens
  misc_feature (1)..(9): Table A2; Target 2142; AFP; ENSG00000081051; HLA-C*07:06;
EGLSPNLNR

SEQ ID NO: 104985 - protein, 10 aa, Homo sapiens
  misc_feature (1)..(10): Table A2; Target 2143; AFP; ENSG00000081051; HLA-A*33:03;
EGQKLISKTR

SEQ ID NO: 104986 - protein, 9 aa, Homo sapiens
  misc_feature (1)..(9): Table A2; Target 2144; AFP; ENSG00000081051; HLA-A*68:02;
EIQKLVLDV

SEQ ID NO: 104987 - protein, 11 aa, Homo sapiens
  misc_feature (1)..(11): Table A2; Target 2145; AFP; ENSG00000081051; HLA-B*08:01;
ELMAITRKMAA

SEQ ID NO: 104988 - protein, 9 aa, Homo sapiens
  misc_feature (1)..(9): Table A2; Target 2146; AFP; ENSG00000081051; HLA-A*25:01;
ELMAITRKM

SEQ ID NO: 104989 - protein, 9 aa, Homo sapiens
  misc_feature (1)..(9): Table A2; Target 2147; AFP; ENSG00000081051; HLA-A*26:01;
ELMAITRKM

SEQ ID NO: 104990 - protein, 9 aa, Homo sapiens
  misc_feature (1)..(9): Table A2; Target 2148; AFP; ENSG00000081051; HLA-A*33:03;
ELMAITRKM

SEQ ID NO: 104991 - protein, 9 aa, Homo sapiens
  misc_feature (1)..(9): Table A2; Target 2149; AFP; ENSG00000081051; HLA-B*08:01;
ELMAITRKM

SEQ ID NO: 104992 - protein, 9 aa, Homo sapiens
  misc_feature (1)..(9): Table A2; Target 2150; AFP; ENSG00000081051; HLA-B*44:02;
ELMAITRKM

SEQ ID NO: 104993 - protein, 9 aa, Homo sapiens
  misc_feature (1)..(9): Table A2; Target 2151; AFP; ENSG00000081051; HLA-B*44:03;
ELMAITRKM

SEQ ID NO: 104994 - protein, 11 aa, Homo sapiens
  misc_feature (1)..(11): Table A2; Target 2152; AFP; ENSG00000081051; HLA-A*33:01;
ELRESSLLNQH

SEQ ID NO: 104995 - protein, 9 aa, Homo sapiens
  misc_feature (1)..(9): Table A2; Target 2153; AFP; ENSG00000081051; HLA-A*02:01;
EMTPVNPGV

SEQ ID NO: 104996 - protein, 9 aa, Homo sapiens
  misc_feature (1)..(9): Table A2; Target 2154; AFP; ENSG00000081051; HLA-A*02:03;
EMTPVNPGV

SEQ ID NO: 104997 - protein, 9 aa, Homo sapiens
  misc_feature (1)..(9): Table A2; Target 2155; AFP; ENSG00000081051; HLA-A*02:07;
EMTPVNPGV

SEQ ID NO: 104998 - protein, 9 aa, Homo sapiens
  misc_feature (1)..(9): Table A2; Target 2156; AFP; ENSG00000081051; HLA-A*26:01;
EMTPVNPGV

SEQ ID NO: 104999 - protein, 9 aa, Homo sapiens
  misc_feature (1)..(9): Table A2; Target 2157; AFP; ENSG00000081051; HLA-A*30:01;
EMTPVNPGV

SEQ ID NO: 105000 - protein, 9 aa, Homo sapiens
  misc_feature (1)..(9): Table A2; Target 2158; AFP; ENSG00000081051; HLA-A*68:02;
EMTPVNPGV

SEQ ID NO: 105001 - protein, 9 aa, Homo sapiens
  misc_feature (1)..(9): Table A2; Target 2159; AFP; ENSG00000081051; HLA-B*13:02;
EMTPVNPGV

SEQ ID NO: 105002 - protein, 9 aa, Homo sapiens
  misc_feature (1)..(9): Table A2; Target 2160; AFP; ENSG00000081051; HLA-B*27:05;
EMTPVNPGV

SEQ ID NO: 105003 - protein, 9 aa, Homo sapiens
  misc_feature (1)..(9): Table A2; Target 2161; AFP; ENSG00000081051; HLA-B*55:01;
EMTPVNPGV

SEQ ID NO: 105004 - protein, 9 aa, Homo sapiens
  misc_feature (1)..(9): Table A2; Target 2162; AFP; ENSG00000081051; HLA-C*04:01;
EMTPVNPGV

SEQ ID NO: 105005 - protein, 9 aa, Homo sapiens
  misc_feature (1)..(9): Table A2; Target 2163; AFP; ENSG00000081051; HLA-C*06:02;
EMTPVNPGV

SEQ ID NO: 105006 - protein, 9 aa, Homo sapiens
  misc_feature (1)..(9): Table A2; Target 2164; AFP; ENSG00000081051; HLA-C*16:02;
EMTPVNPGV

SEQ ID NO: 105007 - protein, 9 aa, Homo sapiens
  misc_feature (1)..(9): Table A2; Target 2165; AFP; ENSG00000081051; HLA-C*05:01;
ENDEKPEGL

SEQ ID NO: 105008 - protein, 9 aa, Homo sapiens
  misc_feature (1)..(9): Table A2; Target 2166; AFP; ENSG00000081051; HLA-A*26:01;
EPVTSCEAY

SEQ ID NO: 105009 - protein, 9 aa, Homo sapiens
  misc_feature (1)..(9): Table A2; Target 2167; AFP; ENSG00000081051; HLA-B*35:01;
EPVTSCEAY

SEQ ID NO: 105010 - protein, 9 aa, Homo sapiens
  misc_feature (1)..(9): Table A2; Target 2168; AFP; ENSG00000081051; HLA-B*55:01;
EPVTSCEAY

SEQ ID NO: 105011 - protein, 10 aa, Homo sapiens
  misc_feature (1)..(10): Table A2; Target 2169; AFP; ENSG00000081051; HLA-A*25:01;
EQLEAVIADF

SEQ ID NO: 105012 - protein, 10 aa, Homo sapiens
  misc_feature (1)..(10): Table A2; Target 2170; AFP; ENSG00000081051; HLA-A*26:01;
EQLEAVIADF

SEQ ID NO: 105013 - protein, 9 aa, Homo sapiens
  misc_feature (1)..(9): Table A2; Target 2171; AFP; ENSG00000081051; HLA-A*68:02;
ESIFLIFLL

SEQ ID NO: 105014 - protein, 8 aa, Homo sapiens
  misc_feature (1)..(8): Table A2; Target 2172; AFP; ENSG00000081051; HLA-A*33:01;
ESQALAKR

SEQ ID NO: 105015 - protein, 8 aa, Homo sapiens
  misc_feature (1)..(8): Table A2; Target 2173; AFP; ENSG00000081051; HLA-A*33:03;
ESQALAKR

SEQ ID NO: 105016 - protein, 9 aa, Homo sapiens
  misc_feature (1)..(9): Table A2; Target 2174; AFP; ENSG00000081051; HLA-A*01:01;
ETFMNKFIY

SEQ ID NO: 105017 - protein, 9 aa, Homo sapiens
  misc_feature (1)..(9): Table A2; Target 2175; AFP; ENSG00000081051; HLA-A*26:01;
ETFMNKFIY

SEQ ID NO: 105018 - protein, 8 aa, Homo sapiens
  misc_feature (1)..(8): Table A2; Target 2176; AFP; ENSG00000081051; HLA-A*25:01;
ETYVPPAF

SEQ ID NO: 105019 - protein, 8 aa, Homo sapiens
  misc_feature (1)..(8): Table A2; Target 2177; AFP; ENSG00000081051; HLA-A*26:01;
ETYVPPAF

SEQ ID NO: 105020 - protein, 8 aa, Homo sapiens
  misc_feature (1)..(8): Table A2; Target 2178; AFP; ENSG00000081051; HLA-B*18:01;
ETYVPPAF

SEQ ID NO: 105021 - protein, 8 aa, Homo sapiens
  misc_feature (1)..(8): Table A2; Target 2179; AFP; ENSG00000081051; HLA-B*57:01;
ETYVPPAF

SEQ ID NO: 105022 - protein, 8 aa, Homo sapiens
  misc_feature (1)..(8): Table A2; Target 2180; AFP; ENSG00000081051; HLA-C*05:01;
ETYVPPAF

SEQ ID NO: 105023 - protein, 10 aa, Homo sapiens
  misc_feature (1)..(10): Table A2; Target 2181; AFP; ENSG00000081051; HLA-A*68:01;
EVSKMVKDAL

SEQ ID NO: 105024 - protein, 10 aa, Homo sapiens
  misc_feature (1)..(10): Table A2; Target 2182; AFP; ENSG00000081051; HLA-A*68:02;
EVSKMVKDAL

SEQ ID NO: 105025 - protein, 10 aa, Homo sapiens
  misc_feature (1)..(10): Table A2; Target 2183; AFP; ENSG00000081051; HLA-B*07:02;
EVSKMVKDAL

SEQ ID NO: 105026 - protein, 10 aa, Homo sapiens
  misc_feature (1)..(10): Table A2; Target 2184; AFP; ENSG00000081051; HLA-C*07:01;
EVSKMVKDAL

SEQ ID NO: 105027 - protein, 11 aa, Homo sapiens
  misc_feature (1)..(11): Table A2; Target 2185; AFP; ENSG00000081051; HLA-A*29:02;
EYGIASILDSY

SEQ ID NO: 105028 - protein, 11 aa, Homo sapiens
  misc_feature (1)..(11): Table A2; Target 2186; AFP; ENSG00000081051; HLA-A*30:02;
EYGIASILDSY

SEQ ID NO: 105029 - protein, 8 aa, Homo sapiens
  misc_feature (1)..(8): Table A2; Target 2187; AFP; ENSG00000081051; HLA-C*14:02;
EYGIASIL

SEQ ID NO: 105030 - protein, 9 aa, Homo sapiens
  misc_feature (1)..(9): Table A2; Target 2188; AFP; ENSG00000081051; HLA-A*24:02;
EYSRRHPQL

SEQ ID NO: 105031 - protein, 9 aa, Homo sapiens
  misc_feature (1)..(9): Table A2; Target 2189; AFP; ENSG00000081051; HLA-A*23:01;
EYYLQNAFL

SEQ ID NO: 105032 - protein, 9 aa, Homo sapiens
  misc_feature (1)..(9): Table A2; Target 2190; AFP; ENSG00000081051; HLA-A*24:02;
EYYLQNAFL

SEQ ID NO: 105033 - protein, 8 aa, Homo sapiens
  misc_feature (1)..(8): Table A2; Target 2191; AFP; ENSG00000081051; HLA-C*14:02;
EYYLQNAF

SEQ ID NO: 105034 - protein, 11 aa, Homo sapiens
  misc_feature (1)..(11): Table A2; Target 2192; AFP; ENSG00000081051; HLA-A*01:01;
FAEEGQKLISK

SEQ ID NO: 105035 - protein, 11 aa, Homo sapiens
  misc_feature (1)..(11): Table A2; Target 2193; AFP; ENSG00000081051; HLA-B*27:02;
FAEEGQKLISK

SEQ ID NO: 105036 - protein, 9 aa, Homo sapiens
  misc_feature (1)..(9): Table A2; Target 2194; AFP; ENSG00000081051; HLA-B*38:01;
FAEEGQKLI

SEQ ID NO: 105037 - protein, 9 aa, Homo sapiens
  misc_feature (1)..(9): Table A2; Target 2195; AFP; ENSG00000081051; HLA-B*49:01;
FAEEGQKLI

SEQ ID NO: 105038 - protein, 9 aa, Homo sapiens
  misc_feature (1)..(9): Table A2; Target 2196; AFP; ENSG00000081051; HLA-B*51:01;
FAEEGQKLI

SEQ ID NO: 105039 - protein, 9 aa, Homo sapiens
  misc_feature (1)..(9): Table A2; Target 2197; AFP; ENSG00000081051; HLA-C*03:03;
FAEEGQKLI

SEQ ID NO: 105040 - protein, 9 aa, Homo sapiens
  misc_feature (1)..(9): Table A2; Target 2198; AFP; ENSG00000081051; HLA-C*03:04;
FAEEGQKLI

SEQ ID NO: 105041 - protein, 9 aa, Homo sapiens
  misc_feature (1)..(9): Table A2; Target 2199; AFP; ENSG00000081051; HLA-C*05:01;
FAEEGQKLI

SEQ ID NO: 105042 - protein, 9 aa, Homo sapiens
  misc_feature (1)..(9): Table A2; Target 2200; AFP; ENSG00000081051; HLA-C*16:02;
FAEEGQKLI

SEQ ID NO: 105043 - protein, 8 aa, Homo sapiens
  misc_feature (1)..(8): Table A2; Target 2201; AFP; ENSG00000081051; HLA-B*35:03;
FAEEGQKL

SEQ ID NO: 105044 - protein, 8 aa, Homo sapiens
  misc_feature (1)..(8): Table A2; Target 2202; AFP; ENSG00000081051; HLA-B*39:01;
FAEEGQKL

SEQ ID NO: 105045 - protein, 8 aa, Homo sapiens
  misc_feature (1)..(8): Table A2; Target 2203; AFP; ENSG00000081051; HLA-C*01:02;
FAEEGQKL

SEQ ID NO: 105046 - protein, 8 aa, Homo sapiens
  misc_feature (1)..(8): Table A2; Target 2204; AFP; ENSG00000081051; HLA-C*03:03;
FAEEGQKL

SEQ ID NO: 105047 - protein, 8 aa, Homo sapiens
  misc_feature (1)..(8): Table A2; Target 2205; AFP; ENSG00000081051; HLA-C*03:04;
FAEEGQKL

SEQ ID NO: 105048 - protein, 8 aa, Homo sapiens
  misc_feature (1)..(8): Table A2; Target 2206; AFP; ENSG00000081051; HLA-C*05:01;
FAEEGQKL

SEQ ID NO: 105049 - protein, 11 aa, Homo sapiens
  misc_feature (1)..(11): Table A2; Target 2207; AFP; ENSG00000081051; HLA-B*27:02;
FAQFVQEATYK

SEQ ID NO: 105050 - protein, 10 aa, Homo sapiens
  misc_feature (1)..(10): Table A2; Target 2208; AFP; ENSG00000081051; HLA-A*01:01;
FAQFVQEATY

SEQ ID NO: 105051 - protein, 10 aa, Homo sapiens
  misc_feature (1)..(10): Table A2; Target 2209; AFP; ENSG00000081051; HLA-A*29:02;
FAQFVQEATY

SEQ ID NO: 105052 - protein, 10 aa, Homo sapiens
  misc_feature (1)..(10): Table A2; Target 2210; AFP; ENSG00000081051; HLA-A*30:02;
FAQFVQEATY

SEQ ID NO: 105053 - protein, 10 aa, Homo sapiens
  misc_feature (1)..(10): Table A2; Target 2211; AFP; ENSG00000081051; HLA-B*27:05;
FAQFVQEATY

SEQ ID NO: 105054 - protein, 10 aa, Homo sapiens
  misc_feature (1)..(10): Table A2; Target 2212; AFP; ENSG00000081051; HLA-B*35:01;
FAQFVQEATY

SEQ ID NO: 105055 - protein, 10 aa, Homo sapiens
  misc_feature (1)..(10): Table A2; Target 2213; AFP; ENSG00000081051; HLA-B*39:01;
FAQFVQEATY

SEQ ID NO: 105056 - protein, 10 aa, Homo sapiens
  misc_feature (1)..(10): Table A2; Target 2214; AFP; ENSG00000081051; HLA-B*46:01;
FAQFVQEATY

SEQ ID NO: 105057 - protein, 10 aa, Homo sapiens
  misc_feature (1)..(10): Table A2; Target 2215; AFP; ENSG00000081051; HLA-B*55:01;
FAQFVQEATY

SEQ ID NO: 105058 - protein, 10 aa, Homo sapiens
  misc_feature (1)..(10): Table A2; Target 2216; AFP; ENSG00000081051; HLA-C*02:02;
FAQFVQEATY

SEQ ID NO: 105059 - protein, 10 aa, Homo sapiens
  misc_feature (1)..(10): Table A2; Target 2217; AFP; ENSG00000081051; HLA-C*03:03;
FAQFVQEATY

SEQ ID NO: 105060 - protein, 10 aa, Homo sapiens
  misc_feature (1)..(10): Table A2; Target 2218; AFP; ENSG00000081051; HLA-C*04:01;
FAQFVQEATY

SEQ ID NO: 105061 - protein, 10 aa, Homo sapiens
  misc_feature (1)..(10): Table A2; Target 2219; AFP; ENSG00000081051; HLA-C*07:01;
FAQFVQEATY

SEQ ID NO: 105062 - protein, 10 aa, Homo sapiens
  misc_feature (1)..(10): Table A2; Target 2220; AFP; ENSG00000081051; HLA-C*12:03;
FAQFVQEATY

SEQ ID NO: 105063 - protein, 10 aa, Homo sapiens
  misc_feature (1)..(10): Table A2; Target 2221; AFP; ENSG00000081051; HLA-C*14:02;
FAQFVQEATY

SEQ ID NO: 105064 - protein, 10 aa, Homo sapiens
  misc_feature (1)..(10): Table A2; Target 2222; AFP; ENSG00000081051; HLA-C*16:02;
FAQFVQEATY

SEQ ID NO: 105065 - protein, 10 aa, Homo sapiens
  misc_feature (1)..(10): Table A2; Target 2223; AFP; ENSG00000081051; HLA-C*16:04;
FAQFVQEATY

SEQ ID NO: 105066 - protein, 8 aa, Homo sapiens
  misc_feature (1)..(8): Table A2; Target 2224; AFP; ENSG00000081051; HLA-B*54:01;
FAQFVQEA

SEQ ID NO: 105067 - protein, 11 aa, Homo sapiens
  misc_feature (1)..(11): Table A2; Target 2225; AFP; ENSG00000081051; HLA-A*29:02;
FFAQFVQEATY

SEQ ID NO: 105068 - protein, 9 aa, Homo sapiens
  misc_feature (1)..(9): Table A2; Target 2226; AFP; ENSG00000081051; HLA-C*14:02;
FFAQFVQEA

SEQ ID NO: 105069 - protein, 10 aa, Homo sapiens
  misc_feature (1)..(10): Table A2; Target 2227; AFP; ENSG00000081051; HLA-A*02:03;
FIFHKDLCQA

SEQ ID NO: 105070 - protein, 10 aa, Homo sapiens
  misc_feature (1)..(10): Table A2; Target 2228; AFP; ENSG00000081051; HLA-A*02:03;
FLAHKKPTPA

SEQ ID NO: 105071 - protein, 9 aa, Homo sapiens
  misc_feature (1)..(9): Table A2; Target 2229; AFP; ENSG00000081051; HLA-A*01:01;
FLASFVHEY

SEQ ID NO: 105072 - protein, 9 aa, Homo sapiens
  misc_feature (1)..(9): Table A2; Target 2230; AFP; ENSG00000081051; HLA-A*02:01;
FLASFVHEY

SEQ ID NO: 105073 - protein, 9 aa, Homo sapiens
  misc_feature (1)..(9): Table A2; Target 2231; AFP; ENSG00000081051; HLA-A*02:03;
FLASFVHEY

SEQ ID NO: 105074 - protein, 9 aa, Homo sapiens
  misc_feature (1)..(9): Table A2; Target 2232; AFP; ENSG00000081051; HLA-A*02:04;
FLASFVHEY

SEQ ID NO: 105075 - protein, 9 aa, Homo sapiens
  misc_feature (1)..(9): Table A2; Target 2233; AFP; ENSG00000081051; HLA-A*02:07;
FLASFVHEY

SEQ ID NO: 105076 - protein, 9 aa, Homo sapiens
  misc_feature (1)..(9): Table A2; Target 2234; AFP; ENSG00000081051; HLA-A*03:01;
FLASFVHEY

SEQ ID NO: 105077 - protein, 9 aa, Homo sapiens
  misc_feature (1)..(9): Table A2; Target 2235; AFP; ENSG00000081051; HLA-A*25:01;
FLASFVHEY

SEQ ID NO: 105078 - protein, 9 aa, Homo sapiens
  misc_feature (1)..(9): Table A2; Target 2236; AFP; ENSG00000081051; HLA-A*26:01;
FLASFVHEY

SEQ ID NO: 105079 - protein, 9 aa, Homo sapiens
  misc_feature (1)..(9): Table A2; Target 2237; AFP; ENSG00000081051; HLA-A*29:02;
FLASFVHEY

SEQ ID NO: 105080 - protein, 9 aa, Homo sapiens
  misc_feature (1)..(9): Table A2; Target 2238; AFP; ENSG00000081051; HLA-A*30:02;
FLASFVHEY

SEQ ID NO: 105081 - protein, 9 aa, Homo sapiens
  misc_feature (1)..(9): Table A2; Target 2239; AFP; ENSG00000081051; HLA-A*32:01;
FLASFVHEY

SEQ ID NO: 105082 - protein, 9 aa, Homo sapiens
  misc_feature (1)..(9): Table A2; Target 2240; AFP; ENSG00000081051; HLA-A*33:01;
FLASFVHEY

SEQ ID NO: 105083 - protein, 9 aa, Homo sapiens
  misc_feature (1)..(9): Table A2; Target 2241; AFP; ENSG00000081051; HLA-A*68:02;
FLASFVHEY

SEQ ID NO: 105084 - protein, 9 aa, Homo sapiens
  misc_feature (1)..(9): Table A2; Target 2242; AFP; ENSG00000081051; HLA-B*15:01;
FLASFVHEY

SEQ ID NO: 105085 - protein, 9 aa, Homo sapiens
  misc_feature (1)..(9): Table A2; Target 2243; AFP; ENSG00000081051; HLA-B*15:03;
FLASFVHEY

SEQ ID NO: 105086 - protein, 9 aa, Homo sapiens
  misc_feature (1)..(9): Table A2; Target 2244; AFP; ENSG00000081051; HLA-B*18:01;
FLASFVHEY

SEQ ID NO: 105087 - protein, 9 aa, Homo sapiens
  misc_feature (1)..(9): Table A2; Target 2245; AFP; ENSG00000081051; HLA-B*35:01;
FLASFVHEY

SEQ ID NO: 105088 - protein, 9 aa, Homo sapiens
  misc_feature (1)..(9): Table A2; Target 2246; AFP; ENSG00000081051; HLA-B*44:02;
FLASFVHEY

SEQ ID NO: 105089 - protein, 9 aa, Homo sapiens
  misc_feature (1)..(9): Table A2; Target 2247; AFP; ENSG00000081051; HLA-B*44:03;
FLASFVHEY

SEQ ID NO: 105090 - protein, 9 aa, Homo sapiens
  misc_feature (1)..(9): Table A2; Target 2248; AFP; ENSG00000081051; HLA-B*46:01;
FLASFVHEY

SEQ ID NO: 105091 - protein, 9 aa, Homo sapiens
  misc_feature (1)..(9): Table A2; Target 2249; AFP; ENSG00000081051; HLA-B*57:01;
FLASFVHEY

SEQ ID NO: 105092 - protein, 9 aa, Homo sapiens
  misc_feature (1)..(9): Table A2; Target 2250; AFP; ENSG00000081051; HLA-C*02:02;
FLASFVHEY

SEQ ID NO: 105093 - protein, 9 aa, Homo sapiens
  misc_feature (1)..(9): Table A2; Target 2251; AFP; ENSG00000081051; HLA-C*07:04;
FLASFVHEY

SEQ ID NO: 105094 - protein, 9 aa, Homo sapiens
  misc_feature (1)..(9): Table A2; Target 2252; AFP; ENSG00000081051; HLA-C*12:03;
FLASFVHEY

SEQ ID NO: 105095 - protein, 9 aa, Homo sapiens
  misc_feature (1)..(9): Table A2; Target 2253; AFP; ENSG00000081051; HLA-C*16:01;
FLASFVHEY

SEQ ID NO: 105096 - protein, 9 aa, Homo sapiens
  misc_feature (1)..(9): Table A2; Target 2254; AFP; ENSG00000081051; HLA-C*16:02;
FLASFVHEY

SEQ ID NO: 105097 - protein, 9 aa, Homo sapiens
  misc_feature (1)..(9): Table A2; Target 2255; AFP; ENSG00000081051; HLA-C*16:04;
FLASFVHEY

SEQ ID NO: 105098 - protein, 10 aa, Homo sapiens
  misc_feature (1)..(10): Table A2; Target 2256; AFP; ENSG00000081051; HLA-A*24:02;
FLGDRDFNQF

SEQ ID NO: 105099 - protein, 11 aa, Homo sapiens
  misc_feature (1)..(11): Table A2; Target 2257; AFP; ENSG00000081051; HLA-A*02:01;
FLLNFTESRTL

SEQ ID NO: 105100 - protein, 11 aa, Homo sapiens
  misc_feature (1)..(11): Table A2; Target 2258; AFP; ENSG00000081051; HLA-A*02:03;
FLLNFTESRTL

SEQ ID NO: 105101 - protein, 11 aa, Homo sapiens
  misc_feature (1)..(11): Table A2; Target 2259; AFP; ENSG00000081051; HLA-A*02:04;
FLLNFTESRTL

SEQ ID NO: 105102 - protein, 9 aa, Homo sapiens
  misc_feature (1)..(9): Table A2; Target 2260; AFP; ENSG00000081051; HLA-A*33:01;
FLLNFTESR

SEQ ID NO: 105103 - protein, 9 aa, Homo sapiens
  misc_feature (1)..(9): Table A2; Target 2261; AFP; ENSG00000081051; HLA-A*33:03;
FLLNFTESR

SEQ ID NO: 105104 - protein, 9 aa, Homo sapiens
  misc_feature (1)..(9): Table A2; Target 2262; AFP; ENSG00000081051; HLA-A*02:03;
FLVAYTKKA

SEQ ID NO: 105105 - protein, 10 aa, Homo sapiens
  misc_feature (1)..(10): Table A2; Target 2263; AFP; ENSG00000081051; HLA-A*29:02;
FLYAPTILLW

SEQ ID NO: 105106 - protein, 9 aa, Homo sapiens
  misc_feature (1)..(9): Table A2; Target 2264; AFP; ENSG00000081051; HLA-A*02:01;
FLYAPTILL

SEQ ID NO: 105107 - protein, 9 aa, Homo sapiens
  misc_feature (1)..(9): Table A2; Target 2265; AFP; ENSG00000081051; HLA-A*02:03;
FLYAPTILL

SEQ ID NO: 105108 - protein, 9 aa, Homo sapiens
  misc_feature (1)..(9): Table A2; Target 2266; AFP; ENSG00000081051; HLA-A*02:04;
FLYAPTILL

SEQ ID NO: 105109 - protein, 9 aa, Homo sapiens
  misc_feature (1)..(9): Table A2; Target 2267; AFP; ENSG00000081051; HLA-A*02:07;
FLYAPTILL

SEQ ID NO: 105110 - protein, 9 aa, Homo sapiens
  misc_feature (1)..(9): Table A2; Target 2268; AFP; ENSG00000081051; HLA-A*02:01;
FMNKFIYEI

SEQ ID NO: 105111 - protein, 9 aa, Homo sapiens
  misc_feature (1)..(9): Table A2; Target 2269; AFP; ENSG00000081051; HLA-A*02:03;
FMNKFIYEI

SEQ ID NO: 105112 - protein, 9 aa, Homo sapiens
  misc_feature (1)..(9): Table A2; Target 2270; AFP; ENSG00000081051; HLA-A*02:04;
FMNKFIYEI

SEQ ID NO: 105113 - protein, 9 aa, Homo sapiens
  misc_feature (1)..(9): Table A2; Target 2271; AFP; ENSG00000081051; HLA-A*02:07;
FMNKFIYEI

SEQ ID NO: 105114 - protein, 9 aa, Homo sapiens
  misc_feature (1)..(9): Table A2; Target 2272; AFP; ENSG00000081051; HLA-A*02:01;
FQAITVTKL

SEQ ID NO: 105115 - protein, 9 aa, Homo sapiens
  misc_feature (1)..(9): Table A2; Target 2273; AFP; ENSG00000081051; HLA-A*02:03;
FQAITVTKL

SEQ ID NO: 105116 - protein, 9 aa, Homo sapiens
  misc_feature (1)..(9): Table A2; Target 2274; AFP; ENSG00000081051; HLA-A*02:04;
FQAITVTKL

SEQ ID NO: 105117 - protein, 9 aa, Homo sapiens
  misc_feature (1)..(9): Table A2; Target 2275; AFP; ENSG00000081051; HLA-A*24:02;
FQAITVTKL

SEQ ID NO: 105118 - protein, 9 aa, Homo sapiens
  misc_feature (1)..(9): Table A2; Target 2276; AFP; ENSG00000081051; HLA-A*30:01;
FQAITVTKL

SEQ ID NO: 105119 - protein, 9 aa, Homo sapiens
  misc_feature (1)..(9): Table A2; Target 2277; AFP; ENSG00000081051; HLA-A*32:01;
FQAITVTKL

SEQ ID NO: 105120 - protein, 9 aa, Homo sapiens
  misc_feature (1)..(9): Table A2; Target 2278; AFP; ENSG00000081051; HLA-A*68:02;
FQAITVTKL

SEQ ID NO: 105121 - protein, 9 aa, Homo sapiens
  misc_feature (1)..(9): Table A2; Target 2279; AFP; ENSG00000081051; HLA-B*13:02;
FQAITVTKL

SEQ ID NO: 105122 - protein, 9 aa, Homo sapiens
  misc_feature (1)..(9): Table A2; Target 2280; AFP; ENSG00000081051; HLA-B*15:01;
FQAITVTKL

SEQ ID NO: 105123 - protein, 9 aa, Homo sapiens
  misc_feature (1)..(9): Table A2; Target 2281; AFP; ENSG00000081051; HLA-B*15:03;
FQAITVTKL

SEQ ID NO: 105124 - protein, 9 aa, Homo sapiens
  misc_feature (1)..(9): Table A2; Target 2282; AFP; ENSG00000081051; HLA-B*27:05;
FQAITVTKL

SEQ ID NO: 105125 - protein, 9 aa, Homo sapiens
  misc_feature (1)..(9): Table A2; Target 2283; AFP; ENSG00000081051; HLA-B*38:01;
FQAITVTKL

SEQ ID NO: 105126 - protein, 9 aa, Homo sapiens
  misc_feature (1)..(9): Table A2; Target 2284; AFP; ENSG00000081051; HLA-B*39:01;
FQAITVTKL

SEQ ID NO: 105127 - protein, 9 aa, Homo sapiens
  misc_feature (1)..(9): Table A2; Target 2285; AFP; ENSG00000081051; HLA-B*40:01;
FQAITVTKL

SEQ ID NO: 105128 - protein, 9 aa, Homo sapiens
  misc_feature (1)..(9): Table A2; Target 2286; AFP; ENSG00000081051; HLA-B*40:02;
FQAITVTKL

SEQ ID NO: 105129 - protein, 9 aa, Homo sapiens
  misc_feature (1)..(9): Table A2; Target 2287; AFP; ENSG00000081051; HLA-B*58:01;
FQAITVTKL

SEQ ID NO: 105130 - protein, 9 aa, Homo sapiens
  misc_feature (1)..(9): Table A2; Target 2288; AFP; ENSG00000081051; HLA-C*02:02;
FQAITVTKL

SEQ ID NO: 105131 - protein, 9 aa, Homo sapiens
  misc_feature (1)..(9): Table A2; Target 2289; AFP; ENSG00000081051; HLA-C*06:02;
FQAITVTKL

SEQ ID NO: 105132 - protein, 9 aa, Homo sapiens
  misc_feature (1)..(9): Table A2; Target 2290; AFP; ENSG00000081051; HLA-C*07:04;
FQAITVTKL

SEQ ID NO: 105133 - protein, 9 aa, Homo sapiens
  misc_feature (1)..(9): Table A2; Target 2291; AFP; ENSG00000081051; HLA-C*12:03;
FQAITVTKL

SEQ ID NO: 105134 - protein, 8 aa, Homo sapiens
  misc_feature (1)..(8): Table A2; Target 2292; AFP; ENSG00000081051; HLA-A*30:02;
FQKLGEYY

SEQ ID NO: 105135 - protein, 8 aa, Homo sapiens
  misc_feature (1)..(8): Table A2; Target 2293; AFP; ENSG00000081051; HLA-B*15:01;
FQKLGEYY

SEQ ID NO: 105136 - protein, 8 aa, Homo sapiens
  misc_feature (1)..(8): Table A2; Target 2294; AFP; ENSG00000081051; HLA-B*15:03;
FQKLGEYY

SEQ ID NO: 105137 - protein, 8 aa, Homo sapiens
  misc_feature (1)..(8): Table A2; Target 2295; AFP; ENSG00000081051; HLA-B*46:01;
FQKLGEYY

SEQ ID NO: 105138 - protein, 8 aa, Homo sapiens
  misc_feature (1)..(8): Table A2; Target 2296; AFP; ENSG00000081051; HLA-C*02:02;
FQKLGEYY

SEQ ID NO: 105139 - protein, 8 aa, Homo sapiens
  misc_feature (1)..(8): Table A2; Target 2297; AFP; ENSG00000081051; HLA-C*07:04;
FQKLGEYY

SEQ ID NO: 105140 - protein, 9 aa, Homo sapiens
  misc_feature (1)..(9): Table A2; Target 2298; AFP; ENSG00000081051; HLA-A*02:01;
FQTENPLEC

SEQ ID NO: 105141 - protein, 9 aa, Homo sapiens
  misc_feature (1)..(9): Table A2; Target 2299; AFP; ENSG00000081051; HLA-A*30:01;
FQTENPLEC

SEQ ID NO: 105142 - protein, 9 aa, Homo sapiens
  misc_feature (1)..(9): Table A2; Target 2300; AFP; ENSG00000081051; HLA-B*13:02;
FQTENPLEC

SEQ ID NO: 105143 - protein, 9 aa, Homo sapiens
  misc_feature (1)..(9): Table A2; Target 2301; AFP; ENSG00000081051; HLA-B*39:01;
FQTENPLEC

SEQ ID NO: 105144 - protein, 9 aa, Homo sapiens
  misc_feature (1)..(9): Table A2; Target 2302; AFP; ENSG00000081051; HLA-C*02:02;
FQTENPLEC

SEQ ID NO: 105145 - protein, 9 aa, Homo sapiens
  misc_feature (1)..(9): Table A2; Target 2303; AFP; ENSG00000081051; HLA-C*03:03;
FQTENPLEC

SEQ ID NO: 105146 - protein, 9 aa, Homo sapiens
  misc_feature (1)..(9): Table A2; Target 2304; AFP; ENSG00000081051; HLA-C*03:04;
FQTENPLEC

SEQ ID NO: 105147 - protein, 9 aa, Homo sapiens
  misc_feature (1)..(9): Table A2; Target 2305; AFP; ENSG00000081051; HLA-C*12:03;
FQTENPLEC

SEQ ID NO: 105148 - protein, 9 aa, Homo sapiens
  misc_feature (1)..(9): Table A2; Target 2306; AFP; ENSG00000081051; HLA-C*16:02;
FQTENPLEC

SEQ ID NO: 105149 - protein, 10 aa, Homo sapiens
  misc_feature (1)..(10): Table A2; Target 2307; AFP; ENSG00000081051; HLA-B*27:05;
FQTKAATVTK

SEQ ID NO: 105150 - protein, 9 aa, Homo sapiens
  misc_feature (1)..(9): Table A2; Target 2308; AFP; ENSG00000081051; HLA-B*13:02;
FQTKAATVT

SEQ ID NO: 105151 - protein, 8 aa, Homo sapiens
  misc_feature (1)..(8): Table A2; Target 2309; AFP; ENSG00000081051; HLA-B*13:02;
FQTKAATV

SEQ ID NO: 105152 - protein, 9 aa, Homo sapiens
  misc_feature (1)..(9): Table A2; Target 2310; AFP; ENSG00000081051; HLA-B*27:05;
FQVPEPVTS

SEQ ID NO: 105153 - protein, 9 aa, Homo sapiens
  misc_feature (1)..(9): Table A2; Target 2311; AFP; ENSG00000081051; HLA-A*01:01;
FSDDKFIFH

SEQ ID NO: 105154 - protein, 9 aa, Homo sapiens
  misc_feature (1)..(9): Table A2; Target 2312; AFP; ENSG00000081051; HLA-C*16:01;
FSSGEKNIF

SEQ ID NO: 105155 - protein, 10 aa, Homo sapiens
  misc_feature (1)..(10): Table A2; Target 2313; AFP; ENSG00000081051; HLA-A*01:01;
FSSLVVDETY

SEQ ID NO: 105156 - protein, 9 aa, Homo sapiens
  misc_feature (1)..(9): Table A2; Target 2314; AFP; ENSG00000081051; HLA-A*01:01;
FTEIQKLVL

SEQ ID NO: 105157 - protein, 9 aa, Homo sapiens
  misc_feature (1)..(9): Table A2; Target 2315; AFP; ENSG00000081051; HLA-C*03:03;
FTEIQKLVL

SEQ ID NO: 105158 - protein, 9 aa, Homo sapiens
  misc_feature (1)..(9): Table A2; Target 2316; AFP; ENSG00000081051; HLA-C*03:04;
FTEIQKLVL

SEQ ID NO: 105159 - protein, 9 aa, Homo sapiens
  misc_feature (1)..(9): Table A2; Target 2317; AFP; ENSG00000081051; HLA-A*01:01;
FTESRTLHR

SEQ ID NO: 105160 - protein, 9 aa, Homo sapiens
  misc_feature (1)..(9): Table A2; Target 2318; AFP; ENSG00000081051; HLA-A*02:03;
FTKVNFTEI

SEQ ID NO: 105161 - protein, 9 aa, Homo sapiens
  misc_feature (1)..(9): Table A2; Target 2319; AFP; ENSG00000081051; HLA-A*24:02;
FTKVNFTEI

SEQ ID NO: 105162 - protein, 9 aa, Homo sapiens
  misc_feature (1)..(9): Table A2; Target 2320; AFP; ENSG00000081051; HLA-A*25:01;
FTKVNFTEI

SEQ ID NO: 105163 - protein, 9 aa, Homo sapiens
  misc_feature (1)..(9): Table A2; Target 2321; AFP; ENSG00000081051; HLA-A*68:02;
FTKVNFTEI

SEQ ID NO: 105164 - protein, 9 aa, Homo sapiens
  misc_feature (1)..(9): Table A2; Target 2322; AFP; ENSG00000081051; HLA-B*40:02;
FTKVNFTEI

SEQ ID NO: 105165 - protein, 9 aa, Homo sapiens
  misc_feature (1)..(9): Table A2; Target 2323; AFP; ENSG00000081051; HLA-B*46:01;
FTKVNFTEI

SEQ ID NO: 105166 - protein, 9 aa, Homo sapiens
  misc_feature (1)..(9): Table A2; Target 2324; AFP; ENSG00000081051; HLA-C*02:02;
FTKVNFTEI

SEQ ID NO: 105167 - protein, 9 aa, Homo sapiens
  misc_feature (1)..(9): Table A2; Target 2325; AFP; ENSG00000081051; HLA-C*03:04;
FTKVNFTEI

SEQ ID NO: 105168 - protein, 10 aa, Homo sapiens
  misc_feature (1)..(10): Table A2; Target 2326; AFP; ENSG00000081051; HLA-A*02:03;
FVQEATYKEV

SEQ ID NO: 105169 - protein, 10 aa, Homo sapiens
  misc_feature (1)..(10): Table A2; Target 2327; AFP; ENSG00000081051; HLA-A*02:07;
FVQEATYKEV

SEQ ID NO: 105170 - protein, 10 aa, Homo sapiens
  misc_feature (1)..(10): Table A2; Target 2328; AFP; ENSG00000081051; HLA-A*25:01;
FVQEATYKEV

SEQ ID NO: 105171 - protein, 10 aa, Homo sapiens
  misc_feature (1)..(10): Table A2; Target 2329; AFP; ENSG00000081051; HLA-A*26:01;
FVQEATYKEV

SEQ ID NO: 105172 - protein, 10 aa, Homo sapiens
  misc_feature (1)..(10): Table A2; Target 2330; AFP; ENSG00000081051; HLA-A*68:02;
FVQEATYKEV

SEQ ID NO: 105173 - protein, 10 aa, Homo sapiens
  misc_feature (1)..(10): Table A2; Target 2331; AFP; ENSG00000081051; HLA-C*02:02;
FVQEATYKEV

SEQ ID NO: 105174 - protein, 10 aa, Homo sapiens
  misc_feature (1)..(10): Table A2; Target 2332; AFP; ENSG00000081051; HLA-C*03:04;
FVQEATYKEV

SEQ ID NO: 105175 - protein, 8 aa, Homo sapiens
  misc_feature (1)..(8): Table A2; Target 2333; AFP; ENSG00000081051; HLA-A*03:02;
FVQEATYK

SEQ ID NO: 105176 - protein, 8 aa, Homo sapiens
  misc_feature (1)..(8): Table A2; Target 2334; AFP; ENSG00000081051; HLA-A*11:01;
FVQEATYK

SEQ ID NO: 105177 - protein, 8 aa, Homo sapiens
  misc_feature (1)..(8): Table A2; Target 2335; AFP; ENSG00000081051; HLA-B*27:02;
FVQEATYK

SEQ ID NO: 105178 - protein, 8 aa, Homo sapiens
  misc_feature (1)..(8): Table A2; Target 2336; AFP; ENSG00000081051; HLA-C*04:01;
FVQEATYK

SEQ ID NO: 105179 - protein, 10 aa, Homo sapiens
  misc_feature (1)..(10): Table A2; Target 2337; AFP; ENSG00000081051; HLA-A*02:03;
GAADIIIGHL

SEQ ID NO: 105180 - protein, 10 aa, Homo sapiens
  misc_feature (1)..(10): Table A2; Target 2338; AFP; ENSG00000081051; HLA-A*02:04;
GAADIIIGHL

SEQ ID NO: 105181 - protein, 10 aa, Homo sapiens
  misc_feature (1)..(10): Table A2; Target 2339; AFP; ENSG00000081051; HLA-A*25:01;
GAADIIIGHL

SEQ ID NO: 105182 - protein, 10 aa, Homo sapiens
  misc_feature (1)..(10): Table A2; Target 2340; AFP; ENSG00000081051; HLA-A*26:01;
GAADIIIGHL

SEQ ID NO: 105183 - protein, 10 aa, Homo sapiens
  misc_feature (1)..(10): Table A2; Target 2341; AFP; ENSG00000081051; HLA-A*30:01;
GAADIIIGHL

SEQ ID NO: 105184 - protein, 10 aa, Homo sapiens
  misc_feature (1)..(10): Table A2; Target 2342; AFP; ENSG00000081051; HLA-A*68:02;
GAADIIIGHL

SEQ ID NO: 105185 - protein, 9 aa, Homo sapiens
  misc_feature (1)..(9): Table A2; Target 2343; AFP; ENSG00000081051; HLA-A*03:01;
GAADIIIGH

SEQ ID NO: 105186 - protein, 9 aa, Homo sapiens
  misc_feature (1)..(9): Table A2; Target 2344; AFP; ENSG00000081051; HLA-A*03:02;
GAADIIIGH

SEQ ID NO: 105187 - protein, 9 aa, Homo sapiens
  misc_feature (1)..(9): Table A2; Target 2345; AFP; ENSG00000081051; HLA-A*11:01;
GAADIIIGH

SEQ ID NO: 105188 - protein, 9 aa, Homo sapiens
  misc_feature (1)..(9): Table A2; Target 2346; AFP; ENSG00000081051; HLA-A*26:01;
GAADIIIGH

SEQ ID NO: 105189 - protein, 9 aa, Homo sapiens
  misc_feature (1)..(9): Table A2; Target 2347; AFP; ENSG00000081051; HLA-A*68:01;
GAADIIIGH

SEQ ID NO: 105190 - protein, 9 aa, Homo sapiens
  misc_feature (1)..(9): Table A2; Target 2348; AFP; ENSG00000081051; HLA-B*27:05;
GAADIIIGH

SEQ ID NO: 105191 - protein, 9 aa, Homo sapiens
  misc_feature (1)..(9): Table A2; Target 2349; AFP; ENSG00000081051; HLA-C*02:02;
GAADIIIGH

SEQ ID NO: 105192 - protein, 9 aa, Homo sapiens
  misc_feature (1)..(9): Table A2; Target 2350; AFP; ENSG00000081051; HLA-C*07:06;
GAADIIIGH

SEQ ID NO: 105193 - protein, 9 aa, Homo sapiens
  misc_feature (1)..(9): Table A2; Target 2351; AFP; ENSG00000081051; HLA-C*12:03;
GAADIIIGH

SEQ ID NO: 105194 - protein, 9 aa, Homo sapiens
  misc_feature (1)..(9): Table A2; Target 2352; AFP; ENSG00000081051; HLA-C*16:04;
GAADIIIGH

SEQ ID NO: 105195 - protein, 8 aa, Homo sapiens
  misc_feature (1)..(8): Table A2; Target 2353; AFP; ENSG00000081051; HLA-B*18:01;
GDRDFNQF

SEQ ID NO: 105196 - protein, 8 aa, Homo sapiens
  misc_feature (1)..(8): Table A2; Target 2354; AFP; ENSG00000081051; HLA-B*37:01;
GDRDFNQF

SEQ ID NO: 105197 - protein, 9 aa, Homo sapiens
  misc_feature (1)..(9): Table A2; Target 2355; AFP; ENSG00000081051; HLA-B*40:01;
GEEELQKYI

SEQ ID NO: 105198 - protein, 9 aa, Homo sapiens
  misc_feature (1)..(9): Table A2; Target 2356; AFP; ENSG00000081051; HLA-B*44:02;
GEEELQKYI

SEQ ID NO: 105199 - protein, 9 aa, Homo sapiens
  misc_feature (1)..(9): Table A2; Target 2357; AFP; ENSG00000081051; HLA-B*44:03;
GEEELQKYI

SEQ ID NO: 105200 - protein, 9 aa, Homo sapiens
  misc_feature (1)..(9): Table A2; Target 2358; AFP; ENSG00000081051; HLA-B*49:01;
GEEELQKYI

SEQ ID NO: 105201 - protein, 8 aa, Homo sapiens
  misc_feature (1)..(8): Table A2; Target 2359; AFP; ENSG00000081051; HLA-B*18:01;
GEEELQKY

SEQ ID NO: 105202 - protein, 8 aa, Homo sapiens
  misc_feature (1)..(8): Table A2; Target 2360; AFP; ENSG00000081051; HLA-B*44:02;
GEEELQKY

SEQ ID NO: 105203 - protein, 9 aa, Homo sapiens
  misc_feature (1)..(9): Table A2; Target 2361; AFP; ENSG00000081051; HLA-B*40:01;
GEGAADIII

SEQ ID NO: 105204 - protein, 9 aa, Homo sapiens
  misc_feature (1)..(9): Table A2; Target 2362; AFP; ENSG00000081051; HLA-B*49:01;
GEGAADIII

SEQ ID NO: 105205 - protein, 8 aa, Homo sapiens
  misc_feature (1)..(8): Table A2; Target 2363; AFP; ENSG00000081051; HLA-B*49:01;
GEKIMSYI

SEQ ID NO: 105206 - protein, 10 aa, Homo sapiens
  misc_feature (1)..(10): Table A2; Target 2364; AFP; ENSG00000081051; HLA-B*44:02;
GEKNIFLASF

SEQ ID NO: 105207 - protein, 10 aa, Homo sapiens
  misc_feature (1)..(10): Table A2; Target 2365; AFP; ENSG00000081051; HLA-B*40:01;
GEYYLQNAFL

SEQ ID NO: 105208 - protein, 10 aa, Homo sapiens
  misc_feature (1)..(10): Table A2; Target 2366; AFP; ENSG00000081051; HLA-B*49:01;
GEYYLQNAFL

SEQ ID NO: 105209 - protein, 9 aa, Homo sapiens
  misc_feature (1)..(9): Table A2; Target 2367; AFP; ENSG00000081051; HLA-A*30:01;
GEYYLQNAF

SEQ ID NO: 105210 - protein, 9 aa, Homo sapiens
  misc_feature (1)..(9): Table A2; Target 2368; AFP; ENSG00000081051; HLA-B*13:02;
GEYYLQNAF

SEQ ID NO: 105211 - protein, 9 aa, Homo sapiens
  misc_feature (1)..(9): Table A2; Target 2369; AFP; ENSG00000081051; HLA-B*15:01;
GEYYLQNAF

SEQ ID NO: 105212 - protein, 9 aa, Homo sapiens
  misc_feature (1)..(9): Table A2; Target 2370; AFP; ENSG00000081051; HLA-B*15:03;
GEYYLQNAF

SEQ ID NO: 105213 - protein, 9 aa, Homo sapiens
  misc_feature (1)..(9): Table A2; Target 2371; AFP; ENSG00000081051; HLA-B*18:01;
GEYYLQNAF

SEQ ID NO: 105214 - protein, 9 aa, Homo sapiens
  misc_feature (1)..(9): Table A2; Target 2372; AFP; ENSG00000081051; HLA-B*27:02;
GEYYLQNAF

SEQ ID NO: 105215 - protein, 9 aa, Homo sapiens
  misc_feature (1)..(9): Table A2; Target 2373; AFP; ENSG00000081051; HLA-B*37:01;
GEYYLQNAF

SEQ ID NO: 105216 - protein, 9 aa, Homo sapiens
  misc_feature (1)..(9): Table A2; Target 2374; AFP; ENSG00000081051; HLA-B*40:01;
GEYYLQNAF

SEQ ID NO: 105217 - protein, 9 aa, Homo sapiens
  misc_feature (1)..(9): Table A2; Target 2375; AFP; ENSG00000081051; HLA-B*44:02;
GEYYLQNAF

SEQ ID NO: 105218 - protein, 9 aa, Homo sapiens
  misc_feature (1)..(9): Table A2; Target 2376; AFP; ENSG00000081051; HLA-B*44:03;
GEYYLQNAF

SEQ ID NO: 105219 - protein, 9 aa, Homo sapiens
  misc_feature (1)..(9): Table A2; Target 2377; AFP; ENSG00000081051; HLA-B*49:01;
GEYYLQNAF

SEQ ID NO: 105220 - protein, 9 aa, Homo sapiens
  misc_feature (1)..(9): Table A2; Target 2378; AFP; ENSG00000081051; HLA-C*16:04;
GEYYLQNAF

SEQ ID NO: 105221 - protein, 8 aa, Homo sapiens
  misc_feature (1)..(8): Table A2; Target 2379; AFP; ENSG00000081051; HLA-B*49:01;
GEYYLQNA

SEQ ID NO: 105222 - protein, 9 aa, Homo sapiens
  misc_feature (1)..(9): Table A2; Target 2380; AFP; ENSG00000081051; HLA-A*01:01;
GIASILDSY

SEQ ID NO: 105223 - protein, 9 aa, Homo sapiens
  misc_feature (1)..(9): Table A2; Target 2381; AFP; ENSG00000081051; HLA-A*25:01;
GIASILDSY

SEQ ID NO: 105224 - protein, 9 aa, Homo sapiens
  misc_feature (1)..(9): Table A2; Target 2382; AFP; ENSG00000081051; HLA-A*26:01;
GIASILDSY

SEQ ID NO: 105225 - protein, 9 aa, Homo sapiens
  misc_feature (1)..(9): Table A2; Target 2383; AFP; ENSG00000081051; HLA-A*29:02;
GIASILDSY

SEQ ID NO: 105226 - protein, 9 aa, Homo sapiens
  misc_feature (1)..(9): Table A2; Target 2384; AFP; ENSG00000081051; HLA-A*30:02;
GIASILDSY

SEQ ID NO: 105227 - protein, 9 aa, Homo sapiens
  misc_feature (1)..(9): Table A2; Target 2385; AFP; ENSG00000081051; HLA-A*32:01;
GIASILDSY

SEQ ID NO: 105228 - protein, 9 aa, Homo sapiens
  misc_feature (1)..(9): Table A2; Target 2386; AFP; ENSG00000081051; HLA-B*15:01;
GIASILDSY

SEQ ID NO: 105229 - protein, 9 aa, Homo sapiens
  misc_feature (1)..(9): Table A2; Target 2387; AFP; ENSG00000081051; HLA-B*15:03;
GIASILDSY

SEQ ID NO: 105230 - protein, 9 aa, Homo sapiens
  misc_feature (1)..(9): Table A2; Target 2388; AFP; ENSG00000081051; HLA-B*27:05;
GIASILDSY

SEQ ID NO: 105231 - protein, 9 aa, Homo sapiens
  misc_feature (1)..(9): Table A2; Target 2389; AFP; ENSG00000081051; HLA-B*35:01;
GIASILDSY

SEQ ID NO: 105232 - protein, 9 aa, Homo sapiens
  misc_feature (1)..(9): Table A2; Target 2390; AFP; ENSG00000081051; HLA-B*44:03;
GIASILDSY

SEQ ID NO: 105233 - protein, 9 aa, Homo sapiens
  misc_feature (1)..(9): Table A2; Target 2391; AFP; ENSG00000081051; HLA-B*46:01;
GIASILDSY

SEQ ID NO: 105234 - protein, 9 aa, Homo sapiens
  misc_feature (1)..(9): Table A2; Target 2392; AFP; ENSG00000081051; HLA-B*55:01;
GIASILDSY

SEQ ID NO: 105235 - protein, 9 aa, Homo sapiens
  misc_feature (1)..(9): Table A2; Target 2393; AFP; ENSG00000081051; HLA-B*58:01;
GIASILDSY

SEQ ID NO: 105236 - protein, 9 aa, Homo sapiens
  misc_feature (1)..(9): Table A2; Target 2394; AFP; ENSG00000081051; HLA-C*02:02;
GIASILDSY

SEQ ID NO: 105237 - protein, 9 aa, Homo sapiens
  misc_feature (1)..(9): Table A2; Target 2395; AFP; ENSG00000081051; HLA-C*03:03;
GIASILDSY

SEQ ID NO: 105238 - protein, 9 aa, Homo sapiens
  misc_feature (1)..(9): Table A2; Target 2396; AFP; ENSG00000081051; HLA-C*07:04;
GIASILDSY

SEQ ID NO: 105239 - protein, 9 aa, Homo sapiens
  misc_feature (1)..(9): Table A2; Target 2397; AFP; ENSG00000081051; HLA-C*16:04;
GIASILDSY

SEQ ID NO: 105240 - protein, 11 aa, Homo sapiens
  misc_feature (1)..(11): Table A2; Target 2398; AFP; ENSG00000081051; HLA-A*02:01;
GLFQKLGEYYL

SEQ ID NO: 105241 - protein, 11 aa, Homo sapiens
  misc_feature (1)..(11): Table A2; Target 2399; AFP; ENSG00000081051; HLA-A*02:04;
GLFQKLGEYYL

SEQ ID NO: 105242 - protein, 10 aa, Homo sapiens
  misc_feature (1)..(10): Table A2; Target 2400; AFP; ENSG00000081051; HLA-A*29:02;
GLFQKLGEYY

SEQ ID NO: 105243 - protein, 10 aa, Homo sapiens
  misc_feature (1)..(10): Table A2; Target 2401; AFP; ENSG00000081051; HLA-A*30:02;
GLFQKLGEYY

SEQ ID NO: 105244 - protein, 9 aa, Homo sapiens
  misc_feature (1)..(9): Table A2; Target 2402; AFP; ENSG00000081051; HLA-A*03:01;
GLFQKLGEY

SEQ ID NO: 105245 - protein, 9 aa, Homo sapiens
  misc_feature (1)..(9): Table A2; Target 2403; AFP; ENSG00000081051; HLA-A*29:02;
GLFQKLGEY

SEQ ID NO: 105246 - protein, 9 aa, Homo sapiens
  misc_feature (1)..(9): Table A2; Target 2404; AFP; ENSG00000081051; HLA-A*30:02;
GLFQKLGEY

SEQ ID NO: 105247 - protein, 9 aa, Homo sapiens
  misc_feature (1)..(9): Table A2; Target 2405; AFP; ENSG00000081051; HLA-B*15:01;
GLFQKLGEY

SEQ ID NO: 105248 - protein, 9 aa, Homo sapiens
  misc_feature (1)..(9): Table A2; Target 2406; AFP; ENSG00000081051; HLA-B*15:03;
GLFQKLGEY

SEQ ID NO: 105249 - protein, 9 aa, Homo sapiens
  misc_feature (1)..(9): Table A2; Target 2407; AFP; ENSG00000081051; HLA-B*46:01;
GLFQKLGEY

SEQ ID NO: 105250 - protein, 10 aa, Homo sapiens
  misc_feature (1)..(10): Table A2; Target 2408; AFP; ENSG00000081051; HLA-A*02:03;
GLSPNLNRFL

SEQ ID NO: 105251 - protein, 10 aa, Homo sapiens
  misc_feature (1)..(10): Table A2; Target 2409; AFP; ENSG00000081051; HLA-A*02:04;
GLSPNLNRFL

SEQ ID NO: 105252 - protein, 9 aa, Homo sapiens
  misc_feature (1)..(9): Table A2; Target 2410; AFP; ENSG00000081051; HLA-B*15:01;
GLSPNLNRF

SEQ ID NO: 105253 - protein, 9 aa, Homo sapiens
  misc_feature (1)..(9): Table A2; Target 2411; AFP; ENSG00000081051; HLA-A*31:01;
GQKLISKTR

SEQ ID NO: 105254 - protein, 10 aa, Homo sapiens
  misc_feature (1)..(10): Table A2; Target 2412; AFP; ENSG00000081051; HLA-A*02:03;
GTRTFQAITV

SEQ ID NO: 105255 - protein, 10 aa, Homo sapiens
  misc_feature (1)..(10): Table A2; Target 2413; AFP; ENSG00000081051; HLA-C*06:02;
GTRTFQAITV

SEQ ID NO: 105256 - protein, 9 aa, Homo sapiens
  misc_feature (1)..(9): Table A2; Target 2414; AFP; ENSG00000081051; HLA-A*29:02;
HEKEILEKY

SEQ ID NO: 105257 - protein, 9 aa, Homo sapiens
  misc_feature (1)..(9): Table A2; Target 2415; AFP; ENSG00000081051; HLA-A*30:01;
HEKEILEKY

SEQ ID NO: 105258 - protein, 9 aa, Homo sapiens
  misc_feature (1)..(9): Table A2; Target 2416; AFP; ENSG00000081051; HLA-A*30:02;
HEKEILEKY

SEQ ID NO: 105259 - protein, 9 aa, Homo sapiens
  misc_feature (1)..(9): Table A2; Target 2417; AFP; ENSG00000081051; HLA-B*15:03;
HEKEILEKY

SEQ ID NO: 105260 - protein, 9 aa, Homo sapiens
  misc_feature (1)..(9): Table A2; Target 2418; AFP; ENSG00000081051; HLA-B*18:01;
HEKEILEKY

SEQ ID NO: 105261 - protein, 9 aa, Homo sapiens
  misc_feature (1)..(9): Table A2; Target 2419; AFP; ENSG00000081051; HLA-B*44:02;
HEKEILEKY

SEQ ID NO: 105262 - protein, 9 aa, Homo sapiens
  misc_feature (1)..(9): Table A2; Target 2420; AFP; ENSG00000081051; HLA-B*44:03;
HEKEILEKY

SEQ ID NO: 105263 - protein, 9 aa, Homo sapiens
  misc_feature (1)..(9): Table A2; Target 2421; AFP; ENSG00000081051; HLA-C*02:02;
HEKEILEKY

SEQ ID NO: 105264 - protein, 9 aa, Homo sapiens
  misc_feature (1)..(9): Table A2; Target 2422; AFP; ENSG00000081051; HLA-C*16:04;
HEKEILEKY

SEQ ID NO: 105265 - protein, 10 aa, Homo sapiens
  misc_feature (1)..(10): Table A2; Target 2423; AFP; ENSG00000081051; HLA-A*30:01;
HEMTPVNPGV

SEQ ID NO: 105266 - protein, 10 aa, Homo sapiens
  misc_feature (1)..(10): Table A2; Target 2424; AFP; ENSG00000081051; HLA-B*40:01;
HEMTPVNPGV

SEQ ID NO: 105267 - protein, 10 aa, Homo sapiens
  misc_feature (1)..(10): Table A2; Target 2425; AFP; ENSG00000081051; HLA-B*49:01;
HEMTPVNPGV

SEQ ID NO: 105268 - protein, 9 aa, Homo sapiens
  misc_feature (1)..(9): Table A2; Target 2426; AFP; ENSG00000081051; HLA-B*15:03;
HKKPTPASI

SEQ ID NO: 105269 - protein, 9 aa, Homo sapiens
  misc_feature (1)..(9): Table A2; Target 2427; AFP; ENSG00000081051; HLA-B*35:01;
HPFLYAPTI

SEQ ID NO: 105270 - protein, 9 aa, Homo sapiens
  misc_feature (1)..(9): Table A2; Target 2428; AFP; ENSG00000081051; HLA-B*35:03;
HPFLYAPTI

SEQ ID NO: 105271 - protein, 9 aa, Homo sapiens
  misc_feature (1)..(9): Table A2; Target 2429; AFP; ENSG00000081051; HLA-B*51:01;
HPFLYAPTI

SEQ ID NO: 105272 - protein, 9 aa, Homo sapiens
  misc_feature (1)..(9): Table A2; Target 2430; AFP; ENSG00000081051; HLA-B*54:01;
HPFLYAPTI

SEQ ID NO: 105273 - protein, 9 aa, Homo sapiens
  misc_feature (1)..(9): Table A2; Target 2431; AFP; ENSG00000081051; HLA-B*56:01;
HPFLYAPTI

SEQ ID NO: 105274 - protein, 10 aa, Homo sapiens
  misc_feature (1)..(10): Table A2; Target 2432; AFP; ENSG00000081051; HLA-B*35:03;
HPQLAVSVIL

SEQ ID NO: 105275 - protein, 9 aa, Homo sapiens
  misc_feature (1)..(9): Table A2; Target 2433; AFP; ENSG00000081051; HLA-B*07:02;
HPQLAVSVI

SEQ ID NO: 105276 - protein, 9 aa, Homo sapiens
  misc_feature (1)..(9): Table A2; Target 2434; AFP; ENSG00000081051; HLA-B*35:01;
HPQLAVSVI

SEQ ID NO: 105277 - protein, 9 aa, Homo sapiens
  misc_feature (1)..(9): Table A2; Target 2435; AFP; ENSG00000081051; HLA-B*35:03;
HPQLAVSVI

SEQ ID NO: 105278 - protein, 9 aa, Homo sapiens
  misc_feature (1)..(9): Table A2; Target 2436; AFP; ENSG00000081051; HLA-B*51:01;
HPQLAVSVI

SEQ ID NO: 105279 - protein, 9 aa, Homo sapiens
  misc_feature (1)..(9): Table A2; Target 2437; AFP; ENSG00000081051; HLA-B*54:01;
HPQLAVSVI

SEQ ID NO: 105280 - protein, 9 aa, Homo sapiens
  misc_feature (1)..(9): Table A2; Target 2438; AFP; ENSG00000081051; HLA-B*55:01;
HPQLAVSVI

SEQ ID NO: 105281 - protein, 9 aa, Homo sapiens
  misc_feature (1)..(9): Table A2; Target 2439; AFP; ENSG00000081051; HLA-B*56:01;
HPQLAVSVI

SEQ ID NO: 105282 - protein, 9 aa, Homo sapiens
  misc_feature (1)..(9): Table A2; Target 2440; AFP; ENSG00000081051; HLA-C*07:02;
HPQLAVSVI

SEQ ID NO: 105283 - protein, 8 aa, Homo sapiens
  misc_feature (1)..(8): Table A2; Target 2441; AFP; ENSG00000081051; HLA-B*07:02;
HPQLAVSV

SEQ ID NO: 105284 - protein, 8 aa, Homo sapiens
  misc_feature (1)..(8): Table A2; Target 2442; AFP; ENSG00000081051; HLA-B*08:01;
HPQLAVSV

SEQ ID NO: 105285 - protein, 8 aa, Homo sapiens
  misc_feature (1)..(8): Table A2; Target 2443; AFP; ENSG00000081051; HLA-B*51:01;
HPQLAVSV

SEQ ID NO: 105286 - protein, 8 aa, Homo sapiens
  misc_feature (1)..(8): Table A2; Target 2444; AFP; ENSG00000081051; HLA-B*54:01;
HPQLAVSV

SEQ ID NO: 105287 - protein, 8 aa, Homo sapiens
  misc_feature (1)..(8): Table A2; Target 2445; AFP; ENSG00000081051; HLA-B*56:01;
HPQLAVSV

SEQ ID NO: 105288 - protein, 10 aa, Homo sapiens
  misc_feature (1)..(10): Table A2; Target 2446; AFP; ENSG00000081051; HLA-A*01:01;
IADFSGLLEK

SEQ ID NO: 105289 - protein, 10 aa, Homo sapiens
  misc_feature (1)..(10): Table A2; Target 2447; AFP; ENSG00000081051; HLA-A*11:01;
IADFSGLLEK

SEQ ID NO: 105290 - protein, 10 aa, Homo sapiens
  misc_feature (1)..(10): Table A2; Target 2448; AFP; ENSG00000081051; HLA-B*27:02;
IADFSGLLEK

SEQ ID NO: 105291 - protein, 8 aa, Homo sapiens
  misc_feature (1)..(8): Table A2; Target 2449; AFP; ENSG00000081051; HLA-C*05:01;
IADFSGLL

SEQ ID NO: 105292 - protein, 8 aa, Homo sapiens
  misc_feature (1)..(8): Table A2; Target 2450; AFP; ENSG00000081051; HLA-A*30:02;
IASILDSY

SEQ ID NO: 105293 - protein, 8 aa, Homo sapiens
  misc_feature (1)..(8): Table A2; Target 2451; AFP; ENSG00000081051; HLA-B*15:01;
IASILDSY

SEQ ID NO: 105294 - protein, 8 aa, Homo sapiens
  misc_feature (1)..(8): Table A2; Target 2452; AFP; ENSG00000081051; HLA-B*15:03;
IASILDSY

SEQ ID NO: 105295 - protein, 8 aa, Homo sapiens
  misc_feature (1)..(8): Table A2; Target 2453; AFP; ENSG00000081051; HLA-B*35:01;
IASILDSY

SEQ ID NO: 105296 - protein, 8 aa, Homo sapiens
  misc_feature (1)..(8): Table A2; Target 2454; AFP; ENSG00000081051; HLA-B*39:01;
IASILDSY

SEQ ID NO: 105297 - protein, 8 aa, Homo sapiens
  misc_feature (1)..(8): Table A2; Target 2455; AFP; ENSG00000081051; HLA-B*46:01;
IASILDSY

SEQ ID NO: 105298 - protein, 8 aa, Homo sapiens
  misc_feature (1)..(8): Table A2; Target 2456; AFP; ENSG00000081051; HLA-C*07:01;
IASILDSY

SEQ ID NO: 105299 - protein, 8 aa, Homo sapiens
  misc_feature (1)..(8): Table A2; Target 2457; AFP; ENSG00000081051; HLA-C*16:01;
IASILDSY

SEQ ID NO: 105300 - protein, 8 aa, Homo sapiens
  misc_feature (1)..(8): Table A2; Target 2458; AFP; ENSG00000081051; HLA-C*16:02;
IASILDSY

SEQ ID NO: 105301 - protein, 8 aa, Homo sapiens
  misc_feature (1)..(8): Table A2; Target 2459; AFP; ENSG00000081051; HLA-B*39:01;
ICSQQDTL

SEQ ID NO: 105302 - protein, 9 aa, Homo sapiens
  misc_feature (1)..(9): Table A2; Target 2460; AFP; ENSG00000081051; HLA-B*40:02;
IEKPTGDEQ

SEQ ID NO: 105303 - protein, 10 aa, Homo sapiens
  misc_feature (1)..(10): Table A2; Target 2461; AFP; ENSG00000081051; HLA-A*29:02;
IFLASFVHEY

SEQ ID NO: 105304 - protein, 10 aa, Homo sapiens
  misc_feature (1)..(10): Table A2; Target 2462; AFP; ENSG00000081051; HLA-A*30:02;
IFLASFVHEY

SEQ ID NO: 105305 - protein, 9 aa, Homo sapiens
  misc_feature (1)..(9): Table A2; Target 2463; AFP; ENSG00000081051; HLA-A*23:01;
IFLIFLLNF

SEQ ID NO: 105306 - protein, 9 aa, Homo sapiens
  misc_feature (1)..(9): Table A2; Target 2464; AFP; ENSG00000081051; HLA-A*24:02;
IFLIFLLNF

SEQ ID NO: 105307 - protein, 9 aa, Homo sapiens
  misc_feature (1)..(9): Table A2; Target 2465; AFP; ENSG00000081051; HLA-A*29:02;
IFLIFLLNF

SEQ ID NO: 105308 - protein, 9 aa, Homo sapiens
  misc_feature (1)..(9): Table A2; Target 2466; AFP; ENSG00000081051; HLA-A*02:01;
ILDSYQCTA

SEQ ID NO: 105309 - protein, 9 aa, Homo sapiens
  misc_feature (1)..(9): Table A2; Target 2467; AFP; ENSG00000081051; HLA-A*02:07;
ILDSYQCTA

SEQ ID NO: 105310 - protein, 9 aa, Homo sapiens
  misc_feature (1)..(9): Table A2; Target 2468; AFP; ENSG00000081051; HLA-B*54:01;
IPLFQVPEP

SEQ ID NO: 105311 - protein, 10 aa, Homo sapiens
  misc_feature (1)..(10): Table A2; Target 2469; AFP; ENSG00000081051; HLA-C*07:06;
IQESQALAKR

SEQ ID NO: 105312 - protein, 9 aa, Homo sapiens
  misc_feature (1)..(9): Table A2; Target 2470; AFP; ENSG00000081051; HLA-A*03:01;
IQESQALAK

SEQ ID NO: 105313 - protein, 9 aa, Homo sapiens
  misc_feature (1)..(9): Table A2; Target 2471; AFP; ENSG00000081051; HLA-A*03:02;
IQESQALAK

SEQ ID NO: 105314 - protein, 9 aa, Homo sapiens
  misc_feature (1)..(9): Table A2; Target 2472; AFP; ENSG00000081051; HLA-A*11:01;
IQESQALAK

SEQ ID NO: 105315 - protein, 9 aa, Homo sapiens
  misc_feature (1)..(9): Table A2; Target 2473; AFP; ENSG00000081051; HLA-B*27:05;
IQESQALAK

SEQ ID NO: 105316 - protein, 8 aa, Homo sapiens
  misc_feature (1)..(8): Table A2; Target 2474; AFP; ENSG00000081051; HLA-B*13:02;
IQKLVLDV

SEQ ID NO: 105317 - protein, 8 aa, Homo sapiens
  misc_feature (1)..(8): Table A2; Target 2475; AFP; ENSG00000081051; HLA-B*08:01;
ISKTRAAL

SEQ ID NO: 105318 - protein, 8 aa, Homo sapiens
  misc_feature (1)..(8): Table A2; Target 2476; AFP; ENSG00000081051; HLA-C*16:01;
ISKTRAAL

SEQ ID NO: 105319 - protein, 10 aa, Homo sapiens
  misc_feature (1)..(10): Table A2; Target 2477; AFP; ENSG00000081051; HLA-B*57:01;
ISLADLATIF

SEQ ID NO: 105320 - protein, 9 aa, Homo sapiens
  misc_feature (1)..(9): Table A2; Target 2478; AFP; ENSG00000081051; HLA-A*23:01;
ISLADLATI

SEQ ID NO: 105321 - protein, 9 aa, Homo sapiens
  misc_feature (1)..(9): Table A2; Target 2479; AFP; ENSG00000081051; HLA-B*58:01;
ISLADLATI

SEQ ID NO: 105322 - protein, 10 aa, Homo sapiens
  misc_feature (1)..(10): Table A2; Target 2480; AFP; ENSG00000081051; HLA-B*57:01;
ITVTKLSQKF

SEQ ID NO: 105323 - protein, 10 aa, Homo sapiens
  misc_feature (1)..(10): Table A2; Target 2481; AFP; ENSG00000081051; HLA-B*58:01;
ITVTKLSQKF

SEQ ID NO: 105324 - protein, 9 aa, Homo sapiens
  misc_feature (1)..(9): Table A2; Target 2482; AFP; ENSG00000081051; HLA-A*03:01;
ITVTKLSQK

SEQ ID NO: 105325 - protein, 9 aa, Homo sapiens
  misc_feature (1)..(9): Table A2; Target 2483; AFP; ENSG00000081051; HLA-A*03:02;
ITVTKLSQK

SEQ ID NO: 105326 - protein, 9 aa, Homo sapiens
  misc_feature (1)..(9): Table A2; Target 2484; AFP; ENSG00000081051; HLA-A*11:01;
ITVTKLSQK

SEQ ID NO: 105327 - protein, 9 aa, Homo sapiens
  misc_feature (1)..(9): Table A2; Target 2485; AFP; ENSG00000081051; HLA-A*68:01;
ITVTKLSQK

SEQ ID NO: 105328 - protein, 9 aa, Homo sapiens
  misc_feature (1)..(9): Table A2; Target 2486; AFP; ENSG00000081051; HLA-C*07:06;
ITVTKLSQK

SEQ ID NO: 105329 - protein, 9 aa, Homo sapiens
  misc_feature (1)..(9): Table A2; Target 2487; AFP; ENSG00000081051; HLA-A*23:01;
KAATVTKEL

SEQ ID NO: 105330 - protein, 9 aa, Homo sapiens
  misc_feature (1)..(9): Table A2; Target 2488; AFP; ENSG00000081051; HLA-A*24:02;
KAATVTKEL

SEQ ID NO: 105331 - protein, 9 aa, Homo sapiens
  misc_feature (1)..(9): Table A2; Target 2489; AFP; ENSG00000081051; HLA-A*32:01;
KAATVTKEL

SEQ ID NO: 105332 - protein, 9 aa, Homo sapiens
  misc_feature (1)..(9): Table A2; Target 2490; AFP; ENSG00000081051; HLA-B*07:02;
KAATVTKEL

SEQ ID NO: 105333 - protein, 9 aa, Homo sapiens
  misc_feature (1)..(9): Table A2; Target 2491; AFP; ENSG00000081051; HLA-B*15:01;
KAATVTKEL

SEQ ID NO: 105334 - protein, 9 aa, Homo sapiens
  misc_feature (1)..(9): Table A2; Target 2492; AFP; ENSG00000081051; HLA-B*15:03;
KAATVTKEL

SEQ ID NO: 105335 - protein, 9 aa, Homo sapiens
  misc_feature (1)..(9): Table A2; Target 2493; AFP; ENSG00000081051; HLA-B*40:01;
KAATVTKEL

SEQ ID NO: 105336 - protein, 9 aa, Homo sapiens
  misc_feature (1)..(9): Table A2; Target 2494; AFP; ENSG00000081051; HLA-B*40:02;
KAATVTKEL

SEQ ID NO: 105337 - protein, 9 aa, Homo sapiens
  misc_feature (1)..(9): Table A2; Target 2495; AFP; ENSG00000081051; HLA-B*46:01;
KAATVTKEL

SEQ ID NO: 105338 - protein, 9 aa, Homo sapiens
  misc_feature (1)..(9): Table A2; Target 2496; AFP; ENSG00000081051; HLA-B*57:01;
KAATVTKEL

SEQ ID NO: 105339 - protein, 9 aa, Homo sapiens
  misc_feature (1)..(9): Table A2; Target 2497; AFP; ENSG00000081051; HLA-B*58:01;
KAATVTKEL

SEQ ID NO: 105340 - protein, 9 aa, Homo sapiens
  misc_feature (1)..(9): Table A2; Target 2498; AFP; ENSG00000081051; HLA-C*01:02;
KAATVTKEL

SEQ ID NO: 105341 - protein, 9 aa, Homo sapiens
  misc_feature (1)..(9): Table A2; Target 2499; AFP; ENSG00000081051; HLA-C*02:02;
KAATVTKEL

SEQ ID NO: 105342 - protein, 9 aa, Homo sapiens
  misc_feature (1)..(9): Table A2; Target 2500; AFP; ENSG00000081051; HLA-C*03:03;
KAATVTKEL

SEQ ID NO: 105343 - protein, 9 aa, Homo sapiens
  misc_feature (1)..(9): Table A2; Target 2501; AFP; ENSG00000081051; HLA-C*03:04;
KAATVTKEL

SEQ ID NO: 105344 - protein, 9 aa, Homo sapiens
  misc_feature (1)..(9): Table A2; Target 2502; AFP; ENSG00000081051; HLA-C*06:02;
KAATVTKEL

SEQ ID NO: 105345 - protein, 9 aa, Homo sapiens
  misc_feature (1)..(9): Table A2; Target 2503; AFP; ENSG00000081051; HLA-C*07:02;
KAATVTKEL

SEQ ID NO: 105346 - protein, 9 aa, Homo sapiens
  misc_feature (1)..(9): Table A2; Target 2504; AFP; ENSG00000081051; HLA-C*12:03;
KAATVTKEL

SEQ ID NO: 105347 - protein, 9 aa, Homo sapiens
  misc_feature (1)..(9): Table A2; Target 2505; AFP; ENSG00000081051; HLA-C*14:02;
KAATVTKEL

SEQ ID NO: 105348 - protein, 9 aa, Homo sapiens
  misc_feature (1)..(9): Table A2; Target 2506; AFP; ENSG00000081051; HLA-C*16:01;
KAATVTKEL

SEQ ID NO: 105349 - protein, 9 aa, Homo sapiens
  misc_feature (1)..(9): Table A2; Target 2507; AFP; ENSG00000081051; HLA-C*16:02;
KAATVTKEL

SEQ ID NO: 105350 - protein, 9 aa, Homo sapiens
  misc_feature (1)..(9): Table A2; Target 2508; AFP; ENSG00000081051; HLA-C*16:04;
KAATVTKEL

SEQ ID NO: 105351 - protein, 9 aa, Homo sapiens
  misc_feature (1)..(9): Table A2; Target 2509; AFP; ENSG00000081051; HLA-B*58:01;
KAENAVECF

SEQ ID NO: 105352 - protein, 9 aa, Homo sapiens
  misc_feature (1)..(9): Table A2; Target 2510; AFP; ENSG00000081051; HLA-C*05:01;
KAENAVECF

SEQ ID NO: 105353 - protein, 9 aa, Homo sapiens
  misc_feature (1)..(9): Table A2; Target 2511; AFP; ENSG00000081051; HLA-C*07:04;
KAENAVECF

SEQ ID NO: 105354 - protein, 10 aa, Homo sapiens
  misc_feature (1)..(10): Table A2; Target 2512; AFP; ENSG00000081051; HLA-B*07:02;
KAPQLTSSEL

SEQ ID NO: 105355 - protein, 10 aa, Homo sapiens
  misc_feature (1)..(10): Table A2; Target 2513; AFP; ENSG00000081051; HLA-B*58:01;
KAPQLTSSEL

SEQ ID NO: 105356 - protein, 10 aa, Homo sapiens
  misc_feature (1)..(10): Table A2; Target 2514; AFP; ENSG00000081051; HLA-C*01:02;
KAPQLTSSEL

SEQ ID NO: 105357 - protein, 9 aa, Homo sapiens
  misc_feature (1)..(9): Table A2; Target 2515; AFP; ENSG00000081051; HLA-A*03:02;
KDALTAIEK

SEQ ID NO: 105358 - protein, 9 aa, Homo sapiens
  misc_feature (1)..(9): Table A2; Target 2516; AFP; ENSG00000081051; HLA-B*37:01;
KDLCQAQGV

SEQ ID NO: 105359 - protein, 9 aa, Homo sapiens
  misc_feature (1)..(9): Table A2; Target 2517; AFP; ENSG00000081051; HLA-B*37:01;
KELRESSLL

SEQ ID NO: 105360 - protein, 9 aa, Homo sapiens
  misc_feature (1)..(9): Table A2; Target 2518; AFP; ENSG00000081051; HLA-B*40:01;
KELRESSLL

SEQ ID NO: 105361 - protein, 9 aa, Homo sapiens
  misc_feature (1)..(9): Table A2; Target 2519; AFP; ENSG00000081051; HLA-B*40:02;
KELRESSLL

SEQ ID NO: 105362 - protein, 8 aa, Homo sapiens
  misc_feature (1)..(8): Table A2; Target 2520; AFP; ENSG00000081051; HLA-B*37:01;
KELRESSL

SEQ ID NO: 105363 - protein, 9 aa, Homo sapiens
  misc_feature (1)..(9): Table A2; Target 2521; AFP; ENSG00000081051; HLA-A*31:01;
KFIYEIARR

SEQ ID NO: 105364 - protein, 9 aa, Homo sapiens
  misc_feature (1)..(9): Table A2; Target 2522; AFP; ENSG00000081051; HLA-A*01:01;
KGEEELQKY

SEQ ID NO: 105365 - protein, 9 aa, Homo sapiens
  misc_feature (1)..(9): Table A2; Target 2523; AFP; ENSG00000081051; HLA-A*30:02;
KGEEELQKY

SEQ ID NO: 105366 - protein, 9 aa, Homo sapiens
  misc_feature (1)..(9): Table A2; Target 2524; AFP; ENSG00000081051; HLA-A*03:01;
KGYQELLEK

SEQ ID NO: 105367 - protein, 9 aa, Homo sapiens
  misc_feature (1)..(9): Table A2; Target 2525; AFP; ENSG00000081051; HLA-A*03:02;
KGYQELLEK

SEQ ID NO: 105368 - protein, 9 aa, Homo sapiens
  misc_feature (1)..(9): Table A2; Target 2526; AFP; ENSG00000081051; HLA-A*11:01;
KGYQELLEK

SEQ ID NO: 105369 - protein, 11 aa, Homo sapiens
  misc_feature (1)..(11): Table A2; Target 2527; AFP; ENSG00000081051; HLA-B*15:03;
KKAPQLTSSEL

SEQ ID NO: 105370 - protein, 9 aa, Homo sapiens
  misc_feature (1)..(9): Table A2; Target 2528; AFP; ENSG00000081051; HLA-A*02:03;
KLSQKFTKV

SEQ ID NO: 105371 - protein, 9 aa, Homo sapiens
  misc_feature (1)..(9): Table A2; Target 2529; AFP; ENSG00000081051; HLA-A*02:01;
KLVLDVAHV

SEQ ID NO: 105372 - protein, 9 aa, Homo sapiens
  misc_feature (1)..(9): Table A2; Target 2530; AFP; ENSG00000081051; HLA-A*02:03;
KLVLDVAHV

SEQ ID NO: 105373 - protein, 9 aa, Homo sapiens
  misc_feature (1)..(9): Table A2; Target 2531; AFP; ENSG00000081051; HLA-A*02:04;
KLVLDVAHV

SEQ ID NO: 105374 - protein, 9 aa, Homo sapiens
  misc_feature (1)..(9): Table A2; Target 2532; AFP; ENSG00000081051; HLA-A*02:07;
KLVLDVAHV

SEQ ID NO: 105375 - protein, 9 aa, Homo sapiens
  misc_feature (1)..(9): Table A2; Target 2533; AFP; ENSG00000081051; HLA-A*02:01;
KMAATAATC

SEQ ID NO: 105376 - protein, 9 aa, Homo sapiens
  misc_feature (1)..(9): Table A2; Target 2534; AFP; ENSG00000081051; HLA-B*55:01;
KMAATAATC

SEQ ID NO: 105377 - protein, 10 aa, Homo sapiens
  misc_feature (1)..(10): Table A2; Target 2535; AFP; ENSG00000081051; HLA-A*02:03;
KMVKDALTAI

SEQ ID NO: 105378 - protein, 9 aa, Homo sapiens
  misc_feature (1)..(9): Table A2; Target 2536; AFP; ENSG00000081051; HLA-B*07:02;
KPEGLSPNL

SEQ ID NO: 105379 - protein, 9 aa, Homo sapiens
  misc_feature (1)..(9): Table A2; Target 2537; AFP; ENSG00000081051; HLA-B*35:03;
KPEGLSPNL

SEQ ID NO: 105380 - protein, 9 aa, Homo sapiens
  misc_feature (1)..(9): Table A2; Target 2538; AFP; ENSG00000081051; HLA-C*07:02;
KPEGLSPNL

SEQ ID NO: 105381 - protein, 11 aa, Homo sapiens
  misc_feature (1)..(11): Table A2; Target 2539; AFP; ENSG00000081051; HLA-B*56:01;
KPQITEEQLEA

SEQ ID NO: 105382 - protein, 9 aa, Homo sapiens
  misc_feature (1)..(9): Table A2; Target 2540; AFP; ENSG00000081051; HLA-B*07:02;
KPQITEEQL

SEQ ID NO: 105383 - protein, 9 aa, Homo sapiens
  misc_feature (1)..(9): Table A2; Target 2541; AFP; ENSG00000081051; HLA-B*35:03;
KPQITEEQL

SEQ ID NO: 105384 - protein, 9 aa, Homo sapiens
  misc_feature (1)..(9): Table A2; Target 2542; AFP; ENSG00000081051; HLA-C*07:02;
KPQITEEQL

SEQ ID NO: 105385 - protein, 10 aa, Homo sapiens
  misc_feature (1)..(10): Table A2; Target 2543; AFP; ENSG00000081051; HLA-A*23:01;
KPTPASIPLF

SEQ ID NO: 105386 - protein, 10 aa, Homo sapiens
  misc_feature (1)..(10): Table A2; Target 2544; AFP; ENSG00000081051; HLA-A*24:02;
KPTPASIPLF

SEQ ID NO: 105387 - protein, 9 aa, Homo sapiens
  misc_feature (1)..(9): Table A2; Target 2545; AFP; ENSG00000081051; HLA-B*07:02;
KPTPASIPL

SEQ ID NO: 105388 - protein, 9 aa, Homo sapiens
  misc_feature (1)..(9): Table A2; Target 2546; AFP; ENSG00000081051; HLA-B*35:03;
KPTPASIPL

SEQ ID NO: 105389 - protein, 9 aa, Homo sapiens
  misc_feature (1)..(9): Table A2; Target 2547; AFP; ENSG00000081051; HLA-C*07:02;
KPTPASIPL

SEQ ID NO: 105390 - protein, 8 aa, Homo sapiens
  misc_feature (1)..(8): Table A2; Target 2548; AFP; ENSG00000081051; HLA-C*06:02;
KTRAALGV

SEQ ID NO: 105391 - protein, 10 aa, Homo sapiens
  misc_feature (1)..(10): Table A2; Target 2549; AFP; ENSG00000081051; HLA-A*03:01;
KVNFTEIQKL

SEQ ID NO: 105392 - protein, 9 aa, Homo sapiens
  misc_feature (1)..(9): Table A2; Target 2550; AFP; ENSG00000081051; HLA-A*03:01;
KVNFTEIQK

SEQ ID NO: 105393 - protein, 9 aa, Homo sapiens
  misc_feature (1)..(9): Table A2; Target 2551; AFP; ENSG00000081051; HLA-A*03:02;
KVNFTEIQK

SEQ ID NO: 105394 - protein, 9 aa, Homo sapiens
  misc_feature (1)..(9): Table A2; Target 2552; AFP; ENSG00000081051; HLA-A*11:01;
KVNFTEIQK

SEQ ID NO: 105395 - protein, 10 aa, Homo sapiens
  misc_feature (1)..(10): Table A2; Target 2553; AFP; ENSG00000081051; HLA-A*24:02;
KWVESIFLIF

SEQ ID NO: 105396 - protein, 9 aa, Homo sapiens
  misc_feature (1)..(9): Table A2; Target 2554; AFP; ENSG00000081051; HLA-A*24:02;
KWVESIFLI

SEQ ID NO: 105397 - protein, 11 aa, Homo sapiens
  misc_feature (1)..(11): Table A2; Target 2555; AFP; ENSG00000081051; HLA-A*03:01;
KYIQESQALAK

SEQ ID NO: 105398 - protein, 11 aa, Homo sapiens
  misc_feature (1)..(11): Table A2; Target 2556; AFP; ENSG00000081051; HLA-A*03:02;
KYIQESQALAK

SEQ ID NO: 105399 - protein, 11 aa, Homo sapiens
  misc_feature (1)..(11): Table A2; Target 2557; AFP; ENSG00000081051; HLA-A*11:01;
KYIQESQALAK

SEQ ID NO: 105400 - protein, 11 aa, Homo sapiens
  misc_feature (1)..(11): Table A2; Target 2558; AFP; ENSG00000081051; HLA-A*31:01;
KYIQESQALAK

SEQ ID NO: 105401 - protein, 11 aa, Homo sapiens
  misc_feature (1)..(11): Table A2; Target 2559; AFP; ENSG00000081051; HLA-A*33:03;
KYIQESQALAK

SEQ ID NO: 105402 - protein, 9 aa, Homo sapiens
  misc_feature (1)..(9): Table A2; Target 2560; AFP; ENSG00000081051; HLA-A*23:01;
KYIQESQAL

SEQ ID NO: 105403 - protein, 9 aa, Homo sapiens
  misc_feature (1)..(9): Table A2; Target 2561; AFP; ENSG00000081051; HLA-A*24:02;
KYIQESQAL

SEQ ID NO: 105404 - protein, 9 aa, Homo sapiens
  misc_feature (1)..(9): Table A2; Target 2562; AFP; ENSG00000081051; HLA-A*30:01;
KYIQESQAL

SEQ ID NO: 105405 - protein, 9 aa, Homo sapiens
  misc_feature (1)..(9): Table A2; Target 2563; AFP; ENSG00000081051; HLA-A*31:01;
KYIQESQAL

SEQ ID NO: 105406 - protein, 9 aa, Homo sapiens
  misc_feature (1)..(9): Table A2; Target 2564; AFP; ENSG00000081051; HLA-A*32:01;
KYIQESQAL

SEQ ID NO: 105407 - protein, 9 aa, Homo sapiens
  misc_feature (1)..(9): Table A2; Target 2565; AFP; ENSG00000081051; HLA-B*15:01;
KYIQESQAL

SEQ ID NO: 105408 - protein, 9 aa, Homo sapiens
  misc_feature (1)..(9): Table A2; Target 2566; AFP; ENSG00000081051; HLA-B*15:03;
KYIQESQAL

SEQ ID NO: 105409 - protein, 9 aa, Homo sapiens
  misc_feature (1)..(9): Table A2; Target 2567; AFP; ENSG00000081051; HLA-B*27:05;
KYIQESQAL

SEQ ID NO: 105410 - protein, 9 aa, Homo sapiens
  misc_feature (1)..(9): Table A2; Target 2568; AFP; ENSG00000081051; HLA-B*35:03;
KYIQESQAL

SEQ ID NO: 105411 - protein, 9 aa, Homo sapiens
  misc_feature (1)..(9): Table A2; Target 2569; AFP; ENSG00000081051; HLA-B*38:01;
KYIQESQAL

SEQ ID NO: 105412 - protein, 9 aa, Homo sapiens
  misc_feature (1)..(9): Table A2; Target 2570; AFP; ENSG00000081051; HLA-B*40:01;
KYIQESQAL

SEQ ID NO: 105413 - protein, 9 aa, Homo sapiens
  misc_feature (1)..(9): Table A2; Target 2571; AFP; ENSG00000081051; HLA-B*40:02;
KYIQESQAL

SEQ ID NO: 105414 - protein, 9 aa, Homo sapiens
  misc_feature (1)..(9): Table A2; Target 2572; AFP; ENSG00000081051; HLA-B*46:01;
KYIQESQAL

SEQ ID NO: 105415 - protein, 9 aa, Homo sapiens
  misc_feature (1)..(9): Table A2; Target 2573; AFP; ENSG00000081051; HLA-B*58:01;
KYIQESQAL

SEQ ID NO: 105416 - protein, 9 aa, Homo sapiens
  misc_feature (1)..(9): Table A2; Target 2574; AFP; ENSG00000081051; HLA-C*01:02;
KYIQESQAL

SEQ ID NO: 105417 - protein, 9 aa, Homo sapiens
  misc_feature (1)..(9): Table A2; Target 2575; AFP; ENSG00000081051; HLA-C*03:03;
KYIQESQAL

SEQ ID NO: 105418 - protein, 9 aa, Homo sapiens
  misc_feature (1)..(9): Table A2; Target 2576; AFP; ENSG00000081051; HLA-C*03:04;
KYIQESQAL

SEQ ID NO: 105419 - protein, 9 aa, Homo sapiens
  misc_feature (1)..(9): Table A2; Target 2577; AFP; ENSG00000081051; HLA-C*04:01;
KYIQESQAL

SEQ ID NO: 105420 - protein, 9 aa, Homo sapiens
  misc_feature (1)..(9): Table A2; Target 2578; AFP; ENSG00000081051; HLA-C*06:02;
KYIQESQAL

SEQ ID NO: 105421 - protein, 9 aa, Homo sapiens
  misc_feature (1)..(9): Table A2; Target 2579; AFP; ENSG00000081051; HLA-C*07:02;
KYIQESQAL

SEQ ID NO: 105422 - protein, 9 aa, Homo sapiens
  misc_feature (1)..(9): Table A2; Target 2580; AFP; ENSG00000081051; HLA-C*14:02;
KYIQESQAL

SEQ ID NO: 105423 - protein, 9 aa, Homo sapiens
  misc_feature (1)..(9): Table A2; Target 2581; AFP; ENSG00000081051; HLA-C*16:01;
KYIQESQAL

SEQ ID NO: 105424 - protein, 9 aa, Homo sapiens
  misc_feature (1)..(9): Table A2; Target 2582; AFP; ENSG00000081051; HLA-C*16:02;
KYIQESQAL

SEQ ID NO: 105425 - protein, 9 aa, Homo sapiens
  misc_feature (1)..(9): Table A2; Target 2583; AFP; ENSG00000081051; HLA-C*16:04;
KYIQESQAL

SEQ ID NO: 105426 - protein, 9 aa, Homo sapiens
  misc_feature (1)..(9): Table A2; Target 2584; AFP; ENSG00000081051; HLA-A*01:01;
LADLATIFF

SEQ ID NO: 105427 - protein, 9 aa, Homo sapiens
  misc_feature (1)..(9): Table A2; Target 2585; AFP; ENSG00000081051; HLA-A*02:07;
LADLATIFF

SEQ ID NO: 105428 - protein, 9 aa, Homo sapiens
  misc_feature (1)..(9): Table A2; Target 2586; AFP; ENSG00000081051; HLA-B*35:01;
LADLATIFF

SEQ ID NO: 105429 - protein, 9 aa, Homo sapiens
  misc_feature (1)..(9): Table A2; Target 2587; AFP; ENSG00000081051; HLA-B*38:01;
LADLATIFF

SEQ ID NO: 105430 - protein, 9 aa, Homo sapiens
  misc_feature (1)..(9): Table A2; Target 2588; AFP; ENSG00000081051; HLA-C*02:02;
LADLATIFF

SEQ ID NO: 105431 - protein, 9 aa, Homo sapiens
  misc_feature (1)..(9): Table A2; Target 2589; AFP; ENSG00000081051; HLA-C*04:01;
LADLATIFF

SEQ ID NO: 105432 - protein, 9 aa, Homo sapiens
  misc_feature (1)..(9): Table A2; Target 2590; AFP; ENSG00000081051; HLA-C*05:01;
LADLATIFF

SEQ ID NO: 105433 - protein, 8 aa, Homo sapiens
  misc_feature (1)..(8): Table A2; Target 2591; AFP; ENSG00000081051; HLA-B*35:01;
LADLATIF

SEQ ID NO: 105434 - protein, 8 aa, Homo sapiens
  misc_feature (1)..(8): Table A2; Target 2592; AFP; ENSG00000081051; HLA-C*05:01;
LADLATIF

SEQ ID NO: 105435 - protein, 9 aa, Homo sapiens
  misc_feature (1)..(9): Table A2; Target 2593; AFP; ENSG00000081051; HLA-B*54:01;
LAHKKPTPA

SEQ ID NO: 105436 - protein, 8 aa, Homo sapiens
  misc_feature (1)..(8): Table A2; Target 2594; AFP; ENSG00000081051; HLA-A*01:01;
LASFVHEY

SEQ ID NO: 105437 - protein, 8 aa, Homo sapiens
  misc_feature (1)..(8): Table A2; Target 2595; AFP; ENSG00000081051; HLA-A*29:02;
LASFVHEY

SEQ ID NO: 105438 - protein, 8 aa, Homo sapiens
  misc_feature (1)..(8): Table A2; Target 2596; AFP; ENSG00000081051; HLA-A*30:02;
LASFVHEY

SEQ ID NO: 105439 - protein, 8 aa, Homo sapiens
  misc_feature (1)..(8): Table A2; Target 2597; AFP; ENSG00000081051; HLA-A*32:01;
LASFVHEY

SEQ ID NO: 105440 - protein, 8 aa, Homo sapiens
  misc_feature (1)..(8): Table A2; Target 2598; AFP; ENSG00000081051; HLA-B*15:01;
LASFVHEY

SEQ ID NO: 105441 - protein, 8 aa, Homo sapiens
  misc_feature (1)..(8): Table A2; Target 2599; AFP; ENSG00000081051; HLA-B*15:03;
LASFVHEY

SEQ ID NO: 105442 - protein, 8 aa, Homo sapiens
  misc_feature (1)..(8): Table A2; Target 2600; AFP; ENSG00000081051; HLA-B*18:01;
LASFVHEY

SEQ ID NO: 105443 - protein, 8 aa, Homo sapiens
  misc_feature (1)..(8): Table A2; Target 2601; AFP; ENSG00000081051; HLA-B*35:01;
LASFVHEY

SEQ ID NO: 105444 - protein, 8 aa, Homo sapiens
  misc_feature (1)..(8): Table A2; Target 2602; AFP; ENSG00000081051; HLA-B*39:01;
LASFVHEY

SEQ ID NO: 105445 - protein, 8 aa, Homo sapiens
  misc_feature (1)..(8): Table A2; Target 2603; AFP; ENSG00000081051; HLA-B*46:01;
LASFVHEY

SEQ ID NO: 105446 - protein, 8 aa, Homo sapiens
  misc_feature (1)..(8): Table A2; Target 2604; AFP; ENSG00000081051; HLA-B*58:01;
LASFVHEY

SEQ ID NO: 105447 - protein, 8 aa, Homo sapiens
  misc_feature (1)..(8): Table A2; Target 2605; AFP; ENSG00000081051; HLA-C*01:02;
LASFVHEY

SEQ ID NO: 105448 - protein, 8 aa, Homo sapiens
  misc_feature (1)..(8): Table A2; Target 2606; AFP; ENSG00000081051; HLA-C*02:02;
LASFVHEY

SEQ ID NO: 105449 - protein, 8 aa, Homo sapiens
  misc_feature (1)..(8): Table A2; Target 2607; AFP; ENSG00000081051; HLA-C*03:03;
LASFVHEY

SEQ ID NO: 105450 - protein, 8 aa, Homo sapiens
  misc_feature (1)..(8): Table A2; Target 2608; AFP; ENSG00000081051; HLA-C*07:01;
LASFVHEY

SEQ ID NO: 105451 - protein, 8 aa, Homo sapiens
  misc_feature (1)..(8): Table A2; Target 2609; AFP; ENSG00000081051; HLA-C*07:04;
LASFVHEY

SEQ ID NO: 105452 - protein, 8 aa, Homo sapiens
  misc_feature (1)..(8): Table A2; Target 2610; AFP; ENSG00000081051; HLA-C*12:03;
LASFVHEY

SEQ ID NO: 105453 - protein, 8 aa, Homo sapiens
  misc_feature (1)..(8): Table A2; Target 2611; AFP; ENSG00000081051; HLA-C*16:01;
LASFVHEY

SEQ ID NO: 105454 - protein, 8 aa, Homo sapiens
  misc_feature (1)..(8): Table A2; Target 2612; AFP; ENSG00000081051; HLA-C*16:02;
LASFVHEY

SEQ ID NO: 105455 - protein, 8 aa, Homo sapiens
  misc_feature (1)..(8): Table A2; Target 2613; AFP; ENSG00000081051; HLA-C*16:04;
LASFVHEY

SEQ ID NO: 105456 - protein, 9 aa, Homo sapiens
  misc_feature (1)..(9): Table A2; Target 2614; AFP; ENSG00000081051; HLA-B*57:01;
LATIFFAQF

SEQ ID NO: 105457 - protein, 9 aa, Homo sapiens
  misc_feature (1)..(9): Table A2; Target 2615; AFP; ENSG00000081051; HLA-C*02:02;
LATIFFAQF

SEQ ID NO: 105458 - protein, 10 aa, Homo sapiens
  misc_feature (1)..(10): Table A2; Target 2616; AFP; ENSG00000081051; HLA-B*54:01;
LAVSVILRVA

SEQ ID NO: 105459 - protein, 9 aa, Homo sapiens
  misc_feature (1)..(9): Table A2; Target 2617; AFP; ENSG00000081051; HLA-A*02:04;
LAVSVILRV

SEQ ID NO: 105460 - protein, 9 aa, Homo sapiens
  misc_feature (1)..(9): Table A2; Target 2618; AFP; ENSG00000081051; HLA-A*02:07;
LAVSVILRV

SEQ ID NO: 105461 - protein, 9 aa, Homo sapiens
  misc_feature (1)..(9): Table A2; Target 2619; AFP; ENSG00000081051; HLA-A*68:02;
LAVSVILRV

SEQ ID NO: 105462 - protein, 9 aa, Homo sapiens
  misc_feature (1)..(9): Table A2; Target 2620; AFP; ENSG00000081051; HLA-B*13:02;
LAVSVILRV

SEQ ID NO: 105463 - protein, 9 aa, Homo sapiens
  misc_feature (1)..(9): Table A2; Target 2621; AFP; ENSG00000081051; HLA-B*51:01;
LAVSVILRV

SEQ ID NO: 105464 - protein, 9 aa, Homo sapiens
  misc_feature (1)..(9): Table A2; Target 2622; AFP; ENSG00000081051; HLA-B*54:01;
LAVSVILRV

SEQ ID NO: 105465 - protein, 9 aa, Homo sapiens
  misc_feature (1)..(9): Table A2; Target 2623; AFP; ENSG00000081051; HLA-C*02:02;
LAVSVILRV

SEQ ID NO: 105466 - protein, 9 aa, Homo sapiens
  misc_feature (1)..(9): Table A2; Target 2624; AFP; ENSG00000081051; HLA-C*12:03;
LAVSVILRV

SEQ ID NO: 105467 - protein, 9 aa, Homo sapiens
  misc_feature (1)..(9): Table A2; Target 2625; AFP; ENSG00000081051; HLA-C*01:02;
LCQAQGVAL

SEQ ID NO: 105468 - protein, 9 aa, Homo sapiens
  misc_feature (1)..(9): Table A2; Target 2626; AFP; ENSG00000081051; HLA-C*03:03;
LCQAQGVAL

SEQ ID NO: 105469 - protein, 9 aa, Homo sapiens
  misc_feature (1)..(9): Table A2; Target 2627; AFP; ENSG00000081051; HLA-C*03:04;
LCQAQGVAL

SEQ ID NO: 105470 - protein, 9 aa, Homo sapiens
  misc_feature (1)..(9): Table A2; Target 2628; AFP; ENSG00000081051; HLA-C*14:02;
LCQAQGVAL

SEQ ID NO: 105471 - protein, 8 aa, Homo sapiens
  misc_feature (1)..(8): Table A2; Target 2629; AFP; ENSG00000081051; HLA-B*18:01;
LEAVIADF

SEQ ID NO: 105472 - protein, 8 aa, Homo sapiens
  misc_feature (1)..(8): Table A2; Target 2630; AFP; ENSG00000081051; HLA-B*37:01;
LEAVIADF

SEQ ID NO: 105473 - protein, 9 aa, Homo sapiens
  misc_feature (1)..(9): Table A2; Target 2631; AFP; ENSG00000081051; HLA-B*18:01;
LENQLPAFL

SEQ ID NO: 105474 - protein, 9 aa, Homo sapiens
  misc_feature (1)..(9): Table A2; Target 2632; AFP; ENSG00000081051; HLA-B*40:01;
LENQLPAFL

SEQ ID NO: 105475 - protein, 9 aa, Homo sapiens
  misc_feature (1)..(9): Table A2; Target 2633; AFP; ENSG00000081051; HLA-B*44:02;
LENQLPAFL

SEQ ID NO: 105476 - protein, 9 aa, Homo sapiens
  misc_feature (1)..(9): Table A2; Target 2634; AFP; ENSG00000081051; HLA-B*44:03;
LENQLPAFL

SEQ ID NO: 105477 - protein, 9 aa, Homo sapiens
  misc_feature (1)..(9): Table A2; Target 2635; AFP; ENSG00000081051; HLA-B*49:01;
LENQLPAFL

SEQ ID NO: 105478 - protein, 8 aa, Homo sapiens
  misc_feature (1)..(8): Table A2; Target 2636; AFP; ENSG00000081051; HLA-B*18:01;
LENQLPAF

SEQ ID NO: 105479 - protein, 8 aa, Homo sapiens
  misc_feature (1)..(8): Table A2; Target 2637; AFP; ENSG00000081051; HLA-B*37:01;
LENQLPAF

SEQ ID NO: 105480 - protein, 9 aa, Homo sapiens
  misc_feature (1)..(9): Table A2; Target 2638; AFP; ENSG00000081051; HLA-A*29:02;
LFQKLGEYY

SEQ ID NO: 105481 - protein, 9 aa, Homo sapiens
  misc_feature (1)..(9): Table A2; Target 2639; AFP; ENSG00000081051; HLA-A*30:02;
LFQKLGEYY

SEQ ID NO: 105482 - protein, 8 aa, Homo sapiens
  misc_feature (1)..(8): Table A2; Target 2640; AFP; ENSG00000081051; HLA-A*30:02;
LFQKLGEY

SEQ ID NO: 105483 - protein, 8 aa, Homo sapiens
  misc_feature (1)..(8): Table A2; Target 2641; AFP; ENSG00000081051; HLA-C*14:02;
LFQKLGEY

SEQ ID NO: 105484 - protein, 9 aa, Homo sapiens
  misc_feature (1)..(9): Table A2; Target 2642; AFP; ENSG00000081051; HLA-A*01:01;
LGDRDFNQF

SEQ ID NO: 105485 - protein, 9 aa, Homo sapiens
  misc_feature (1)..(9): Table A2; Target 2643; AFP; ENSG00000081051; HLA-B*38:01;
LGDRDFNQF

SEQ ID NO: 105486 - protein, 9 aa, Homo sapiens
  misc_feature (1)..(9): Table A2; Target 2644; AFP; ENSG00000081051; HLA-C*05:01;
LGDRDFNQF

SEQ ID NO: 105487 - protein, 9 aa, Homo sapiens
  misc_feature (1)..(9): Table A2; Target 2645; AFP; ENSG00000081051; HLA-A*02:01;
LLNQHACAV

SEQ ID NO: 105488 - protein, 9 aa, Homo sapiens
  misc_feature (1)..(9): Table A2; Target 2646; AFP; ENSG00000081051; HLA-A*02:03;
LLNQHACAV

SEQ ID NO: 105489 - protein, 9 aa, Homo sapiens
  misc_feature (1)..(9): Table A2; Target 2647; AFP; ENSG00000081051; HLA-B*55:01;
LLNQHACAV

SEQ ID NO: 105490 - protein, 9 aa, Homo sapiens
  misc_feature (1)..(9): Table A2; Target 2648; AFP; ENSG00000081051; HLA-C*03:03;
LNFTESRTL

SEQ ID NO: 105491 - protein, 9 aa, Homo sapiens
  misc_feature (1)..(9): Table A2; Target 2649; AFP; ENSG00000081051; HLA-C*03:04;
LNFTESRTL

SEQ ID NO: 105492 - protein, 9 aa, Homo sapiens
  misc_feature (1)..(9): Table A2; Target 2650; AFP; ENSG00000081051; HLA-C*16:01;
LNFTESRTL

SEQ ID NO: 105493 - protein, 8 aa, Homo sapiens
  misc_feature (1)..(8): Table A2; Target 2651; AFP; ENSG00000081051; HLA-B*35:01;
LPAFLEEL

SEQ ID NO: 105494 - protein, 8 aa, Homo sapiens
  misc_feature (1)..(8): Table A2; Target 2652; AFP; ENSG00000081051; HLA-B*35:03;
LPAFLEEL

SEQ ID NO: 105495 - protein, 8 aa, Homo sapiens
  misc_feature (1)..(8): Table A2; Target 2653; AFP; ENSG00000081051; HLA-B*51:01;
LPAFLEEL

SEQ ID NO: 105496 - protein, 8 aa, Homo sapiens
  misc_feature (1)..(8): Table A2; Target 2654; AFP; ENSG00000081051; HLA-B*56:01;
LPAFLEEL

SEQ ID NO: 105497 - protein, 10 aa, Homo sapiens
  misc_feature (1)..(10): Table A2; Target 2655; AFP; ENSG00000081051; HLA-A*01:01;
LQDGEKIMSY

SEQ ID NO: 105498 - protein, 10 aa, Homo sapiens
  misc_feature (1)..(10): Table A2; Target 2656; AFP; ENSG00000081051; HLA-A*30:02;
LQDGEKIMSY

SEQ ID NO: 105499 - protein, 10 aa, Homo sapiens
  misc_feature (1)..(10): Table A2; Target 2657; AFP; ENSG00000081051; HLA-B*15:01;
LQDGEKIMSY

SEQ ID NO: 105500 - protein, 10 aa, Homo sapiens
  misc_feature (1)..(10): Table A2; Target 2658; AFP; ENSG00000081051; HLA-C*07:04;
LQDGEKIMSY

SEQ ID NO: 105501 - protein, 8 aa, Homo sapiens
  misc_feature (1)..(8): Table A2; Target 2659; AFP; ENSG00000081051; HLA-C*05:01;
LQDGEKIM

SEQ ID NO: 105502 - protein, 9 aa, Homo sapiens
  misc_feature (1)..(9): Table A2; Target 2660; AFP; ENSG00000081051; HLA-A*03:01;
LQNAFLVAY

SEQ ID NO: 105503 - protein, 9 aa, Homo sapiens
  misc_feature (1)..(9): Table A2; Target 2661; AFP; ENSG00000081051; HLA-A*26:01;
LQNAFLVAY

SEQ ID NO: 105504 - protein, 9 aa, Homo sapiens
  misc_feature (1)..(9): Table A2; Target 2662; AFP; ENSG00000081051; HLA-A*29:02;
LQNAFLVAY

SEQ ID NO: 105505 - protein, 9 aa, Homo sapiens
  misc_feature (1)..(9): Table A2; Target 2663; AFP; ENSG00000081051; HLA-A*30:02;
LQNAFLVAY

SEQ ID NO: 105506 - protein, 9 aa, Homo sapiens
  misc_feature (1)..(9): Table A2; Target 2664; AFP; ENSG00000081051; HLA-A*31:01;
LQNAFLVAY

SEQ ID NO: 105507 - protein, 9 aa, Homo sapiens
  misc_feature (1)..(9): Table A2; Target 2665; AFP; ENSG00000081051; HLA-A*32:01;
LQNAFLVAY

SEQ ID NO: 105508 - protein, 9 aa, Homo sapiens
  misc_feature (1)..(9): Table A2; Target 2666; AFP; ENSG00000081051; HLA-B*15:01;
LQNAFLVAY

SEQ ID NO: 105509 - protein, 9 aa, Homo sapiens
  misc_feature (1)..(9): Table A2; Target 2667; AFP; ENSG00000081051; HLA-B*15:03;
LQNAFLVAY

SEQ ID NO: 105510 - protein, 9 aa, Homo sapiens
  misc_feature (1)..(9): Table A2; Target 2668; AFP; ENSG00000081051; HLA-B*18:01;
LQNAFLVAY

SEQ ID NO: 105511 - protein, 9 aa, Homo sapiens
  misc_feature (1)..(9): Table A2; Target 2669; AFP; ENSG00000081051; HLA-B*27:02;
LQNAFLVAY

SEQ ID NO: 105512 - protein, 9 aa, Homo sapiens
  misc_feature (1)..(9): Table A2; Target 2670; AFP; ENSG00000081051; HLA-B*27:05;
LQNAFLVAY

SEQ ID NO: 105513 - protein, 9 aa, Homo sapiens
  misc_feature (1)..(9): Table A2; Target 2671; AFP; ENSG00000081051; HLA-B*35:01;
LQNAFLVAY

SEQ ID NO: 105514 - protein, 9 aa, Homo sapiens
  misc_feature (1)..(9): Table A2; Target 2672; AFP; ENSG00000081051; HLA-B*39:01;
LQNAFLVAY

SEQ ID NO: 105515 - protein, 9 aa, Homo sapiens
  misc_feature (1)..(9): Table A2; Target 2673; AFP; ENSG00000081051; HLA-B*44:02;
LQNAFLVAY

SEQ ID NO: 105516 - protein, 9 aa, Homo sapiens
  misc_feature (1)..(9): Table A2; Target 2674; AFP; ENSG00000081051; HLA-B*44:03;
LQNAFLVAY

SEQ ID NO: 105517 - protein, 9 aa, Homo sapiens
  misc_feature (1)..(9): Table A2; Target 2675; AFP; ENSG00000081051; HLA-B*46:01;
LQNAFLVAY

SEQ ID NO: 105518 - protein, 9 aa, Homo sapiens
  misc_feature (1)..(9): Table A2; Target 2676; AFP; ENSG00000081051; HLA-C*01:02;
LQNAFLVAY

SEQ ID NO: 105519 - protein, 9 aa, Homo sapiens
  misc_feature (1)..(9): Table A2; Target 2677; AFP; ENSG00000081051; HLA-C*02:02;
LQNAFLVAY

SEQ ID NO: 105520 - protein, 9 aa, Homo sapiens
  misc_feature (1)..(9): Table A2; Target 2678; AFP; ENSG00000081051; HLA-C*03:03;
LQNAFLVAY

SEQ ID NO: 105521 - protein, 9 aa, Homo sapiens
  misc_feature (1)..(9): Table A2; Target 2679; AFP; ENSG00000081051; HLA-C*07:01;
LQNAFLVAY

SEQ ID NO: 105522 - protein, 9 aa, Homo sapiens
  misc_feature (1)..(9): Table A2; Target 2680; AFP; ENSG00000081051; HLA-C*07:04;
LQNAFLVAY

SEQ ID NO: 105523 - protein, 9 aa, Homo sapiens
  misc_feature (1)..(9): Table A2; Target 2681; AFP; ENSG00000081051; HLA-C*12:03;
LQNAFLVAY

SEQ ID NO: 105524 - protein, 9 aa, Homo sapiens
  misc_feature (1)..(9): Table A2; Target 2682; AFP; ENSG00000081051; HLA-C*14:02;
LQNAFLVAY

SEQ ID NO: 105525 - protein, 9 aa, Homo sapiens
  misc_feature (1)..(9): Table A2; Target 2683; AFP; ENSG00000081051; HLA-C*16:01;
LQNAFLVAY

SEQ ID NO: 105526 - protein, 9 aa, Homo sapiens
  misc_feature (1)..(9): Table A2; Target 2684; AFP; ENSG00000081051; HLA-C*16:02;
LQNAFLVAY

SEQ ID NO: 105527 - protein, 9 aa, Homo sapiens
  misc_feature (1)..(9): Table A2; Target 2685; AFP; ENSG00000081051; HLA-C*16:04;
LQNAFLVAY

SEQ ID NO: 105528 - protein, 8 aa, Homo sapiens
  misc_feature (1)..(8): Table A2; Target 2686; AFP; ENSG00000081051; HLA-B*15:01;
LQTMKQEF

SEQ ID NO: 105529 - protein, 10 aa, Homo sapiens
  misc_feature (1)..(10): Table A2; Target 2687; AFP; ENSG00000081051; HLA-B*57:01;
LSQKFTKVNF

SEQ ID NO: 105530 - protein, 10 aa, Homo sapiens
  misc_feature (1)..(10): Table A2; Target 2688; AFP; ENSG00000081051; HLA-B*58:01;
LSQKFTKVNF

SEQ ID NO: 105531 - protein, 11 aa, Homo sapiens
  misc_feature (1)..(11): Table A2; Target 2689; AFP; ENSG00000081051; HLA-A*33:03;
LTSSELMAITR

SEQ ID NO: 105532 - protein, 11 aa, Homo sapiens
  misc_feature (1)..(11): Table A2; Target 2690; AFP; ENSG00000081051; HLA-A*68:01;
LTSSELMAITR

SEQ ID NO: 105533 - protein, 11 aa, Homo sapiens
  misc_feature (1)..(11): Table A2; Target 2691; AFP; ENSG00000081051; HLA-B*27:02;
LTSSELMAITR

SEQ ID NO: 105534 - protein, 11 aa, Homo sapiens
  misc_feature (1)..(11): Table A2; Target 2692; AFP; ENSG00000081051; HLA-C*07:06;
LTSSELMAITR

SEQ ID NO: 105535 - protein, 8 aa, Homo sapiens
  misc_feature (1)..(8): Table A2; Target 2693; AFP; ENSG00000081051; HLA-B*08:01;
LVKQKPQI

SEQ ID NO: 105536 - protein, 9 aa, Homo sapiens
  misc_feature (1)..(9): Table A2; Target 2694; AFP; ENSG00000081051; HLA-A*23:01;
LYAPTILLW

SEQ ID NO: 105537 - protein, 9 aa, Homo sapiens
  misc_feature (1)..(9): Table A2; Target 2695; AFP; ENSG00000081051; HLA-A*24:02;
LYAPTILLW

SEQ ID NO: 105538 - protein, 9 aa, Homo sapiens
  misc_feature (1)..(9): Table A2; Target 2696; AFP; ENSG00000081051; HLA-A*29:02;
LYAPTILLW

SEQ ID NO: 105539 - protein, 9 aa, Homo sapiens
  misc_feature (1)..(9): Table A2; Target 2697; AFP; ENSG00000081051; HLA-B*57:01;
LYAPTILLW

SEQ ID NO: 105540 - protein, 8 aa, Homo sapiens
  misc_feature (1)..(8): Table A2; Target 2698; AFP; ENSG00000081051; HLA-A*23:01;
LYAPTILL

SEQ ID NO: 105541 - protein, 8 aa, Homo sapiens
  misc_feature (1)..(8): Table A2; Target 2699; AFP; ENSG00000081051; HLA-A*24:02;
LYAPTILL

SEQ ID NO: 105542 - protein, 9 aa, Homo sapiens
  misc_feature (1)..(9): Table A2; Target 2700; AFP; ENSG00000081051; HLA-B*51:01;
MAATAATCC

SEQ ID NO: 105543 - protein, 9 aa, Homo sapiens
  misc_feature (1)..(9): Table A2; Target 2701; AFP; ENSG00000081051; HLA-B*54:01;
MAATAATCC

SEQ ID NO: 105544 - protein, 9 aa, Homo sapiens
  misc_feature (1)..(9): Table A2; Target 2702; AFP; ENSG00000081051; HLA-C*03:03;
MAATAATCC

SEQ ID NO: 105545 - protein, 9 aa, Homo sapiens
  misc_feature (1)..(9): Table A2; Target 2703; AFP; ENSG00000081051; HLA-C*03:04;
MAATAATCC

SEQ ID NO: 105546 - protein, 8 aa, Homo sapiens
  misc_feature (1)..(8): Table A2; Target 2704; AFP; ENSG00000081051; HLA-B*51:01;
MAATAATC

SEQ ID NO: 105547 - protein, 8 aa, Homo sapiens
  misc_feature (1)..(8): Table A2; Target 2705; AFP; ENSG00000081051; HLA-C*03:04;
MAATAATC

SEQ ID NO: 105548 - protein, 9 aa, Homo sapiens
  misc_feature (1)..(9): Table A2; Target 2706; AFP; ENSG00000081051; HLA-B*08:01;
MAITRKMAA

SEQ ID NO: 105549 - protein, 9 aa, Homo sapiens
  misc_feature (1)..(9): Table A2; Target 2707; AFP; ENSG00000081051; HLA-B*54:01;
MAITRKMAA

SEQ ID NO: 105550 - protein, 9 aa, Homo sapiens
  misc_feature (1)..(9): Table A2; Target 2708; AFP; ENSG00000081051; HLA-C*16:01;
MAITRKMAA

SEQ ID NO: 105551 - protein, 11 aa, Homo sapiens
  misc_feature (1)..(11): Table A2; Target 2709; AFP; ENSG00000081051; HLA-A*03:01;
MVKDALTAIEK

SEQ ID NO: 105552 - protein, 11 aa, Homo sapiens
  misc_feature (1)..(11): Table A2; Target 2710; AFP; ENSG00000081051; HLA-A*03:02;
MVKDALTAIEK

SEQ ID NO: 105553 - protein, 11 aa, Homo sapiens
  misc_feature (1)..(11): Table A2; Target 2711; AFP; ENSG00000081051; HLA-A*11:01;
MVKDALTAIEK

SEQ ID NO: 105554 - protein, 11 aa, Homo sapiens
  misc_feature (1)..(11): Table A2; Target 2712; AFP; ENSG00000081051; HLA-A*31:01;
MVKDALTAIEK

SEQ ID NO: 105555 - protein, 11 aa, Homo sapiens
  misc_feature (1)..(11): Table A2; Target 2713; AFP; ENSG00000081051; HLA-A*33:01;
MVKDALTAIEK

SEQ ID NO: 105556 - protein, 11 aa, Homo sapiens
  misc_feature (1)..(11): Table A2; Target 2714; AFP; ENSG00000081051; HLA-A*33:03;
MVKDALTAIEK

SEQ ID NO: 105557 - protein, 11 aa, Homo sapiens
  misc_feature (1)..(11): Table A2; Target 2715; AFP; ENSG00000081051; HLA-A*68:01;
MVKDALTAIEK

SEQ ID NO: 105558 - protein, 9 aa, Homo sapiens
  misc_feature (1)..(9): Table A2; Target 2716; AFP; ENSG00000081051; HLA-A*02:03;
MVKDALTAI

SEQ ID NO: 105559 - protein, 9 aa, Homo sapiens
  misc_feature (1)..(9): Table A2; Target 2717; AFP; ENSG00000081051; HLA-A*23:01;
MVKDALTAI

SEQ ID NO: 105560 - protein, 9 aa, Homo sapiens
  misc_feature (1)..(9): Table A2; Target 2718; AFP; ENSG00000081051; HLA-A*25:01;
MVKDALTAI

SEQ ID NO: 105561 - protein, 9 aa, Homo sapiens
  misc_feature (1)..(9): Table A2; Target 2719; AFP; ENSG00000081051; HLA-A*26:01;
MVKDALTAI

SEQ ID NO: 105562 - protein, 9 aa, Homo sapiens
  misc_feature (1)..(9): Table A2; Target 2720; AFP; ENSG00000081051; HLA-A*32:01;
MVKDALTAI

SEQ ID NO: 105563 - protein, 9 aa, Homo sapiens
  misc_feature (1)..(9): Table A2; Target 2721; AFP; ENSG00000081051; HLA-A*33:03;
MVKDALTAI

SEQ ID NO: 105564 - protein, 9 aa, Homo sapiens
  misc_feature (1)..(9): Table A2; Target 2722; AFP; ENSG00000081051; HLA-A*68:02;
MVKDALTAI

SEQ ID NO: 105565 - protein, 9 aa, Homo sapiens
  misc_feature (1)..(9): Table A2; Target 2723; AFP; ENSG00000081051; HLA-B*08:01;
MVKDALTAI

SEQ ID NO: 105566 - protein, 9 aa, Homo sapiens
  misc_feature (1)..(9): Table A2; Target 2724; AFP; ENSG00000081051; HLA-B*40:02;
MVKDALTAI

SEQ ID NO: 105567 - protein, 9 aa, Homo sapiens
  misc_feature (1)..(9): Table A2; Target 2725; AFP; ENSG00000081051; HLA-B*46:01;
MVKDALTAI

SEQ ID NO: 105568 - protein, 9 aa, Homo sapiens
  misc_feature (1)..(9): Table A2; Target 2726; AFP; ENSG00000081051; HLA-B*51:01;
MVKDALTAI

SEQ ID NO: 105569 - protein, 9 aa, Homo sapiens
  misc_feature (1)..(9): Table A2; Target 2727; AFP; ENSG00000081051; HLA-B*54:01;
MVKDALTAI

SEQ ID NO: 105570 - protein, 9 aa, Homo sapiens
  misc_feature (1)..(9): Table A2; Target 2728; AFP; ENSG00000081051; HLA-C*01:02;
MVKDALTAI

SEQ ID NO: 105571 - protein, 9 aa, Homo sapiens
  misc_feature (1)..(9): Table A2; Target 2729; AFP; ENSG00000081051; HLA-C*02:02;
MVKDALTAI

SEQ ID NO: 105572 - protein, 9 aa, Homo sapiens
  misc_feature (1)..(9): Table A2; Target 2730; AFP; ENSG00000081051; HLA-C*03:03;
MVKDALTAI

SEQ ID NO: 105573 - protein, 9 aa, Homo sapiens
  misc_feature (1)..(9): Table A2; Target 2731; AFP; ENSG00000081051; HLA-C*03:04;
MVKDALTAI

SEQ ID NO: 105574 - protein, 9 aa, Homo sapiens
  misc_feature (1)..(9): Table A2; Target 2732; AFP; ENSG00000081051; HLA-C*07:04;
MVKDALTAI

SEQ ID NO: 105575 - protein, 9 aa, Homo sapiens
  misc_feature (1)..(9): Table A2; Target 2733; AFP; ENSG00000081051; HLA-C*14:02;
MVKDALTAI

SEQ ID NO: 105576 - protein, 9 aa, Homo sapiens
  misc_feature (1)..(9): Table A2; Target 2734; AFP; ENSG00000081051; HLA-A*11:01;
NAFLVAYTK

SEQ ID NO: 105577 - protein, 9 aa, Homo sapiens
  misc_feature (1)..(9): Table A2; Target 2735; AFP; ENSG00000081051; HLA-A*68:01;
NAFLVAYTK

SEQ ID NO: 105578 - protein, 9 aa, Homo sapiens
  misc_feature (1)..(9): Table A2; Target 2736; AFP; ENSG00000081051; HLA-B*35:01;
NAFLVAYTK

SEQ ID NO: 105579 - protein, 9 aa, Homo sapiens
  misc_feature (1)..(9): Table A2; Target 2737; AFP; ENSG00000081051; HLA-C*07:06;
NAFLVAYTK

SEQ ID NO: 105580 - protein, 9 aa, Homo sapiens
  misc_feature (1)..(9): Table A2; Target 2738; AFP; ENSG00000081051; HLA-A*33:01;
NAVECFQTK

SEQ ID NO: 105581 - protein, 9 aa, Homo sapiens
  misc_feature (1)..(9): Table A2; Target 2739; AFP; ENSG00000081051; HLA-A*68:01;
NAVECFQTK

SEQ ID NO: 105582 - protein, 9 aa, Homo sapiens
  misc_feature (1)..(9): Table A2; Target 2740; AFP; ENSG00000081051; HLA-C*07:06;
NAVECFQTK

SEQ ID NO: 105583 - protein, 9 aa, Homo sapiens
  misc_feature (1)..(9): Table A2; Target 2741; AFP; ENSG00000081051; HLA-A*30:01;
NEYGIASIL

SEQ ID NO: 105584 - protein, 9 aa, Homo sapiens
  misc_feature (1)..(9): Table A2; Target 2742; AFP; ENSG00000081051; HLA-B*18:01;
NEYGIASIL

SEQ ID NO: 105585 - protein, 9 aa, Homo sapiens
  misc_feature (1)..(9): Table A2; Target 2743; AFP; ENSG00000081051; HLA-B*37:01;
NEYGIASIL

SEQ ID NO: 105586 - protein, 9 aa, Homo sapiens
  misc_feature (1)..(9): Table A2; Target 2744; AFP; ENSG00000081051; HLA-B*39:01;
NEYGIASIL

SEQ ID NO: 105587 - protein, 9 aa, Homo sapiens
  misc_feature (1)..(9): Table A2; Target 2745; AFP; ENSG00000081051; HLA-B*40:01;
NEYGIASIL

SEQ ID NO: 105588 - protein, 9 aa, Homo sapiens
  misc_feature (1)..(9): Table A2; Target 2746; AFP; ENSG00000081051; HLA-B*40:02;
NEYGIASIL

SEQ ID NO: 105589 - protein, 9 aa, Homo sapiens
  misc_feature (1)..(9): Table A2; Target 2747; AFP; ENSG00000081051; HLA-B*44:02;
NEYGIASIL

SEQ ID NO: 105590 - protein, 9 aa, Homo sapiens
  misc_feature (1)..(9): Table A2; Target 2748; AFP; ENSG00000081051; HLA-B*44:03;
NEYGIASIL

SEQ ID NO: 105591 - protein, 9 aa, Homo sapiens
  misc_feature (1)..(9): Table A2; Target 2749; AFP; ENSG00000081051; HLA-B*49:01;
NEYGIASIL

SEQ ID NO: 105592 - protein, 9 aa, Homo sapiens
  misc_feature (1)..(9): Table A2; Target 2750; AFP; ENSG00000081051; HLA-C*02:02;
NEYGIASIL

SEQ ID NO: 105593 - protein, 9 aa, Homo sapiens
  misc_feature (1)..(9): Table A2; Target 2751; AFP; ENSG00000081051; HLA-C*12:03;
NEYGIASIL

SEQ ID NO: 105594 - protein, 9 aa, Homo sapiens
  misc_feature (1)..(9): Table A2; Target 2752; AFP; ENSG00000081051; HLA-C*14:02;
NEYGIASIL

SEQ ID NO: 105595 - protein, 9 aa, Homo sapiens
  misc_feature (1)..(9): Table A2; Target 2753; AFP; ENSG00000081051; HLA-C*16:04;
NEYGIASIL

SEQ ID NO: 105596 - protein, 8 aa, Homo sapiens
  misc_feature (1)..(8): Table A2; Target 2754; AFP; ENSG00000081051; HLA-A*30:01;
NEYGIASI

SEQ ID NO: 105597 - protein, 8 aa, Homo sapiens
  misc_feature (1)..(8): Table A2; Target 2755; AFP; ENSG00000081051; HLA-B*18:01;
NEYGIASI

SEQ ID NO: 105598 - protein, 8 aa, Homo sapiens
  misc_feature (1)..(8): Table A2; Target 2756; AFP; ENSG00000081051; HLA-B*37:01;
NEYGIASI

SEQ ID NO: 105599 - protein, 8 aa, Homo sapiens
  misc_feature (1)..(8): Table A2; Target 2757; AFP; ENSG00000081051; HLA-B*49:01;
NEYGIASI

SEQ ID NO: 105600 - protein, 8 aa, Homo sapiens
  misc_feature (1)..(8): Table A2; Target 2758; AFP; ENSG00000081051; HLA-C*14:02;
NFTEIQKL

SEQ ID NO: 105601 - protein, 8 aa, Homo sapiens
  misc_feature (1)..(8): Table A2; Target 2759; AFP; ENSG00000081051; HLA-C*01:02;
NFTESRTL

SEQ ID NO: 105602 - protein, 8 aa, Homo sapiens
  misc_feature (1)..(8): Table A2; Target 2760; AFP; ENSG00000081051; HLA-C*14:02;
NFTESRTL

SEQ ID NO: 105603 - protein, 8 aa, Homo sapiens
  misc_feature (1)..(8): Table A2; Target 2761; AFP; ENSG00000081051; HLA-C*16:01;
NFTESRTL

SEQ ID NO: 105604 - protein, 11 aa, Homo sapiens
  misc_feature (1)..(11): Table A2; Target 2762; AFP; ENSG00000081051; HLA-A*29:02;
NIFLASFVHEY

SEQ ID NO: 105605 - protein, 11 aa, Homo sapiens
  misc_feature (1)..(11): Table A2; Target 2763; AFP; ENSG00000081051; HLA-B*38:01;
NQFSSGEKNIF

SEQ ID NO: 105606 - protein, 10 aa, Homo sapiens
  misc_feature (1)..(10): Table A2; Target 2764; AFP; ENSG00000081051; HLA-B*13:02;
NQFSSGEKNI

SEQ ID NO: 105607 - protein, 8 aa, Homo sapiens
  misc_feature (1)..(8): Table A2; Target 2765; AFP; ENSG00000081051; HLA-A*23:01;
PFLYAPTI

SEQ ID NO: 105608 - protein, 9 aa, Homo sapiens
  misc_feature (1)..(9): Table A2; Target 2766; AFP; ENSG00000081051; HLA-A*24:02;
PTPASIPLF

SEQ ID NO: 105609 - protein, 9 aa, Homo sapiens
  misc_feature (1)..(9): Table A2; Target 2767; AFP; ENSG00000081051; HLA-A*26:01;
PTPASIPLF

SEQ ID NO: 105610 - protein, 11 aa, Homo sapiens
  misc_feature (1)..(11): Table A2; Target 2768; AFP; ENSG00000081051; HLA-A*03:02;
QAITVTKLSQK

SEQ ID NO: 105611 - protein, 11 aa, Homo sapiens
  misc_feature (1)..(11): Table A2; Target 2769; AFP; ENSG00000081051; HLA-A*11:01;
QAITVTKLSQK

SEQ ID NO: 105612 - protein, 11 aa, Homo sapiens
  misc_feature (1)..(11): Table A2; Target 2770; AFP; ENSG00000081051; HLA-A*31:01;
QAITVTKLSQK

SEQ ID NO: 105613 - protein, 11 aa, Homo sapiens
  misc_feature (1)..(11): Table A2; Target 2771; AFP; ENSG00000081051; HLA-A*68:01;
QAITVTKLSQK

SEQ ID NO: 105614 - protein, 11 aa, Homo sapiens
  misc_feature (1)..(11): Table A2; Target 2772; AFP; ENSG00000081051; HLA-C*07:06;
QAITVTKLSQK

SEQ ID NO: 105615 - protein, 8 aa, Homo sapiens
  misc_feature (1)..(8): Table A2; Target 2773; AFP; ENSG00000081051; HLA-A*23:01;
QAITVTKL

SEQ ID NO: 105616 - protein, 8 aa, Homo sapiens
  misc_feature (1)..(8): Table A2; Target 2774; AFP; ENSG00000081051; HLA-A*24:02;
QAITVTKL

SEQ ID NO: 105617 - protein, 8 aa, Homo sapiens
  misc_feature (1)..(8): Table A2; Target 2775; AFP; ENSG00000081051; HLA-A*30:01;
QAITVTKL

SEQ ID NO: 105618 - protein, 8 aa, Homo sapiens
  misc_feature (1)..(8): Table A2; Target 2776; AFP; ENSG00000081051; HLA-A*32:01;
QAITVTKL

SEQ ID NO: 105619 - protein, 8 aa, Homo sapiens
  misc_feature (1)..(8): Table A2; Target 2777; AFP; ENSG00000081051; HLA-B*08:01;
QAITVTKL

SEQ ID NO: 105620 - protein, 8 aa, Homo sapiens
  misc_feature (1)..(8): Table A2; Target 2778; AFP; ENSG00000081051; HLA-B*15:01;
QAITVTKL

SEQ ID NO: 105621 - protein, 8 aa, Homo sapiens
  misc_feature (1)..(8): Table A2; Target 2779; AFP; ENSG00000081051; HLA-B*15:03;
QAITVTKL

SEQ ID NO: 105622 - protein, 8 aa, Homo sapiens
  misc_feature (1)..(8): Table A2; Target 2780; AFP; ENSG00000081051; HLA-B*18:01;
QAITVTKL

SEQ ID NO: 105623 - protein, 8 aa, Homo sapiens
  misc_feature (1)..(8): Table A2; Target 2781; AFP; ENSG00000081051; HLA-B*35:03;
QAITVTKL

SEQ ID NO: 105624 - protein, 8 aa, Homo sapiens
  misc_feature (1)..(8): Table A2; Target 2782; AFP; ENSG00000081051; HLA-B*40:01;
QAITVTKL

SEQ ID NO: 105625 - protein, 8 aa, Homo sapiens
  misc_feature (1)..(8): Table A2; Target 2783; AFP; ENSG00000081051; HLA-B*40:02;
QAITVTKL

SEQ ID NO: 105626 - protein, 8 aa, Homo sapiens
  misc_feature (1)..(8): Table A2; Target 2784; AFP; ENSG00000081051; HLA-B*46:01;
QAITVTKL

SEQ ID NO: 105627 - protein, 8 aa, Homo sapiens
  misc_feature (1)..(8): Table A2; Target 2785; AFP; ENSG00000081051; HLA-B*51:01;
QAITVTKL

SEQ ID NO: 105628 - protein, 8 aa, Homo sapiens
  misc_feature (1)..(8): Table A2; Target 2786; AFP; ENSG00000081051; HLA-B*58:01;
QAITVTKL

SEQ ID NO: 105629 - protein, 8 aa, Homo sapiens
  misc_feature (1)..(8): Table A2; Target 2787; AFP; ENSG00000081051; HLA-C*01:02;
QAITVTKL

SEQ ID NO: 105630 - protein, 8 aa, Homo sapiens
  misc_feature (1)..(8): Table A2; Target 2788; AFP; ENSG00000081051; HLA-C*02:02;
QAITVTKL

SEQ ID NO: 105631 - protein, 8 aa, Homo sapiens
  misc_feature (1)..(8): Table A2; Target 2789; AFP; ENSG00000081051; HLA-C*03:03;
QAITVTKL

SEQ ID NO: 105632 - protein, 8 aa, Homo sapiens
  misc_feature (1)..(8): Table A2; Target 2790; AFP; ENSG00000081051; HLA-C*03:04;
QAITVTKL

SEQ ID NO: 105633 - protein, 8 aa, Homo sapiens
  misc_feature (1)..(8): Table A2; Target 2791; AFP; ENSG00000081051; HLA-C*05:01;
QAITVTKL

SEQ ID NO: 105634 - protein, 8 aa, Homo sapiens
  misc_feature (1)..(8): Table A2; Target 2792; AFP; ENSG00000081051; HLA-C*06:02;
QAITVTKL

SEQ ID NO: 105635 - protein, 8 aa, Homo sapiens
  misc_feature (1)..(8): Table A2; Target 2793; AFP; ENSG00000081051; HLA-C*07:01;
QAITVTKL

SEQ ID NO: 105636 - protein, 8 aa, Homo sapiens
  misc_feature (1)..(8): Table A2; Target 2794; AFP; ENSG00000081051; HLA-C*12:03;
QAITVTKL

SEQ ID NO: 105637 - protein, 8 aa, Homo sapiens
  misc_feature (1)..(8): Table A2; Target 2795; AFP; ENSG00000081051; HLA-C*16:01;
QAITVTKL

SEQ ID NO: 105638 - protein, 8 aa, Homo sapiens
  misc_feature (1)..(8): Table A2; Target 2796; AFP; ENSG00000081051; HLA-C*16:02;
QAITVTKL

SEQ ID NO: 105639 - protein, 11 aa, Homo sapiens
  misc_feature (1)..(11): Table A2; Target 2797; AFP; ENSG00000081051; HLA-A*03:02;
QAQGVALQTMK

SEQ ID NO: 105640 - protein, 11 aa, Homo sapiens
  misc_feature (1)..(11): Table A2; Target 2798; AFP; ENSG00000081051; HLA-A*11:01;
QAQGVALQTMK

SEQ ID NO: 105641 - protein, 11 aa, Homo sapiens
  misc_feature (1)..(11): Table A2; Target 2799; AFP; ENSG00000081051; HLA-A*68:01;
QAQGVALQTMK

SEQ ID NO: 105642 - protein, 11 aa, Homo sapiens
  misc_feature (1)..(11): Table A2; Target 2800; AFP; ENSG00000081051; HLA-B*27:02;
QAQGVALQTMK

SEQ ID NO: 105643 - protein, 10 aa, Homo sapiens
  misc_feature (1)..(10): Table A2; Target 2801; AFP; ENSG00000081051; HLA-B*35:01;
QAQGVALQTM

SEQ ID NO: 105644 - protein, 10 aa, Homo sapiens
  misc_feature (1)..(10): Table A2; Target 2802; AFP; ENSG00000081051; HLA-B*35:03;
QAQGVALQTM

SEQ ID NO: 105645 - protein, 10 aa, Homo sapiens
  misc_feature (1)..(10): Table A2; Target 2803; AFP; ENSG00000081051; HLA-B*58:01;
QAQGVALQTM

SEQ ID NO: 105646 - protein, 10 aa, Homo sapiens
  misc_feature (1)..(10): Table A2; Target 2804; AFP; ENSG00000081051; HLA-C*03:04;
QAQGVALQTM

SEQ ID NO: 105647 - protein, 10 aa, Homo sapiens
  misc_feature (1)..(10): Table A2; Target 2805; AFP; ENSG00000081051; HLA-C*04:01;
QAQGVALQTM

SEQ ID NO: 105648 - protein, 10 aa, Homo sapiens
  misc_feature (1)..(10): Table A2; Target 2806; AFP; ENSG00000081051; HLA-C*07:06;
QAQGVALQTM

SEQ ID NO: 105649 - protein, 10 aa, Homo sapiens
  misc_feature (1)..(10): Table A2; Target 2807; AFP; ENSG00000081051; HLA-C*16:02;
QAQGVALQTM

SEQ ID NO: 105650 - protein, 9 aa, Homo sapiens
  misc_feature (1)..(9): Table A2; Target 2808; AFP; ENSG00000081051; HLA-B*18:01;
QDGEKIMSY

SEQ ID NO: 105651 - protein, 9 aa, Homo sapiens
  misc_feature (1)..(9): Table A2; Target 2809; AFP; ENSG00000081051; HLA-B*37:01;
QDGEKIMSY

SEQ ID NO: 105652 - protein, 9 aa, Homo sapiens
  misc_feature (1)..(9): Table A2; Target 2810; AFP; ENSG00000081051; HLA-B*44:02;
QDGEKIMSY

SEQ ID NO: 105653 - protein, 9 aa, Homo sapiens
  misc_feature (1)..(9): Table A2; Target 2811; AFP; ENSG00000081051; HLA-B*44:03;
QDGEKIMSY

SEQ ID NO: 105654 - protein, 9 aa, Homo sapiens
  misc_feature (1)..(9): Table A2; Target 2812; AFP; ENSG00000081051; HLA-C*12:03;
QDGEKIMSY

SEQ ID NO: 105655 - protein, 8 aa, Homo sapiens
  misc_feature (1)..(8): Table A2; Target 2813; AFP; ENSG00000081051; HLA-B*13:02;
QDTLSNKI

SEQ ID NO: 105656 - protein, 8 aa, Homo sapiens
  misc_feature (1)..(8): Table A2; Target 2814; AFP; ENSG00000081051; HLA-B*37:01;
QDTLSNKI

SEQ ID NO: 105657 - protein, 8 aa, Homo sapiens
  misc_feature (1)..(8): Table A2; Target 2815; AFP; ENSG00000081051; HLA-B*49:01;
QDTLSNKI

SEQ ID NO: 105658 - protein, 8 aa, Homo sapiens
  misc_feature (1)..(8): Table A2; Target 2816; AFP; ENSG00000081051; HLA-C*16:02;
QDTLSNKI

SEQ ID NO: 105659 - protein, 8 aa, Homo sapiens
  misc_feature (1)..(8): Table A2; Target 2817; AFP; ENSG00000081051; HLA-B*49:01;
QEATYKEV

SEQ ID NO: 105660 - protein, 8 aa, Homo sapiens
  misc_feature (1)..(8): Table A2; Target 2818; AFP; ENSG00000081051; HLA-A*30:01;
QEFLINLV

SEQ ID NO: 105661 - protein, 8 aa, Homo sapiens
  misc_feature (1)..(8): Table A2; Target 2819; AFP; ENSG00000081051; HLA-B*18:01;
QEFLINLV

SEQ ID NO: 105662 - protein, 8 aa, Homo sapiens
  misc_feature (1)..(8): Table A2; Target 2820; AFP; ENSG00000081051; HLA-B*37:01;
QEFLINLV

SEQ ID NO: 105663 - protein, 8 aa, Homo sapiens
  misc_feature (1)..(8): Table A2; Target 2821; AFP; ENSG00000081051; HLA-B*49:01;
QEFLINLV

SEQ ID NO: 105664 - protein, 9 aa, Homo sapiens
  misc_feature (1)..(9): Table A2; Target 2822; AFP; ENSG00000081051; HLA-B*44:02;
QESQALAKR

SEQ ID NO: 105665 - protein, 9 aa, Homo sapiens
  misc_feature (1)..(9): Table A2; Target 2823; AFP; ENSG00000081051; HLA-B*44:03;
QESQALAKR

SEQ ID NO: 105666 - protein, 9 aa, Homo sapiens
  misc_feature (1)..(9): Table A2; Target 2824; AFP; ENSG00000081051; HLA-C*16:04;
QESQALAKR

SEQ ID NO: 105667 - protein, 8 aa, Homo sapiens
  misc_feature (1)..(8): Table A2; Target 2825; AFP; ENSG00000081051; HLA-C*14:02;
QFVQEATY

SEQ ID NO: 105668 - protein, 9 aa, Homo sapiens
  misc_feature (1)..(9): Table A2; Target 2826; AFP; ENSG00000081051; HLA-B*27:02;
QGVALQTMK

SEQ ID NO: 105669 - protein, 8 aa, Homo sapiens
  misc_feature (1)..(8): Table A2; Target 2827; AFP; ENSG00000081051; HLA-B*51:01;
QGVALQTM

SEQ ID NO: 105670 - protein, 10 aa, Homo sapiens
  misc_feature (1)..(10): Table A2; Target 2828; AFP; ENSG00000081051; HLA-B*38:01;
QHACAVMKNF

SEQ ID NO: 105671 - protein, 8 aa, Homo sapiens
  misc_feature (1)..(8): Table A2; Target 2829; AFP; ENSG00000081051; HLA-B*15:03;
QKFTKVNF

SEQ ID NO: 105672 - protein, 10 aa, Homo sapiens
  misc_feature (1)..(10): Table A2; Target 2830; AFP; ENSG00000081051; HLA-B*15:03;
QKYIQESQAL

SEQ ID NO: 105673 - protein, 10 aa, Homo sapiens
  misc_feature (1)..(10): Table A2; Target 2831; AFP; ENSG00000081051; HLA-A*02:03;
QLAVSVILRV

SEQ ID NO: 105674 - protein, 9 aa, Homo sapiens
  misc_feature (1)..(9): Table A2; Target 2832; AFP; ENSG00000081051; HLA-A*68:01;
QLAVSVILR

SEQ ID NO: 105675 - protein, 9 aa, Homo sapiens
  misc_feature (1)..(9): Table A2; Target 2833; AFP; ENSG00000081051; HLA-C*07:06;
QLAVSVILR

SEQ ID NO: 105676 - protein, 9 aa, Homo sapiens
  misc_feature (1)..(9): Table A2; Target 2834; AFP; ENSG00000081051; HLA-A*02:01;
QLPAFLEEL

SEQ ID NO: 105677 - protein, 9 aa, Homo sapiens
  misc_feature (1)..(9): Table A2; Target 2835; AFP; ENSG00000081051; HLA-A*02:03;
QLPAFLEEL

SEQ ID NO: 105678 - protein, 9 aa, Homo sapiens
  misc_feature (1)..(9): Table A2; Target 2836; AFP; ENSG00000081051; HLA-A*02:04;
QLPAFLEEL

SEQ ID NO: 105679 - protein, 9 aa, Homo sapiens
  misc_feature (1)..(9): Table A2; Target 2837; AFP; ENSG00000081051; HLA-A*02:07;
QLPAFLEEL

SEQ ID NO: 105680 - protein, 9 aa, Homo sapiens
  misc_feature (1)..(9): Table A2; Target 2838; AFP; ENSG00000081051; HLA-A*24:02;
QLPAFLEEL

SEQ ID NO: 105681 - protein, 9 aa, Homo sapiens
  misc_feature (1)..(9): Table A2; Target 2839; AFP; ENSG00000081051; HLA-C*01:02;
QLPAFLEEL

SEQ ID NO: 105682 - protein, 10 aa, Homo sapiens
  misc_feature (1)..(10): Table A2; Target 2840; AFP; ENSG00000081051; HLA-A*02:01;
QLSEDKLLAC

SEQ ID NO: 105683 - protein, 9 aa, Homo sapiens
  misc_feature (1)..(9): Table A2; Target 2841; AFP; ENSG00000081051; HLA-A*02:01;
QLSEDKLLA

SEQ ID NO: 105684 - protein, 9 aa, Homo sapiens
  misc_feature (1)..(9): Table A2; Target 2842; AFP; ENSG00000081051; HLA-B*13:02;
QLSEDKLLA

SEQ ID NO: 105685 - protein, 10 aa, Homo sapiens
  misc_feature (1)..(10): Table A2; Target 2843; AFP; ENSG00000081051; HLA-B*27:02;
QNAFLVAYTK

SEQ ID NO: 105686 - protein, 9 aa, Homo sapiens
  misc_feature (1)..(9): Table A2; Target 2844; AFP; ENSG00000081051; HLA-B*13:02;
QQDTLSNKI

SEQ ID NO: 105687 - protein, 9 aa, Homo sapiens
  misc_feature (1)..(9): Table A2; Target 2845; AFP; ENSG00000081051; HLA-B*38:01;
QQDTLSNKI

SEQ ID NO: 105688 - protein, 9 aa, Homo sapiens
  misc_feature (1)..(9): Table A2; Target 2846; AFP; ENSG00000081051; HLA-B*39:01;
QQDTLSNKI

SEQ ID NO: 105689 - protein, 9 aa, Homo sapiens
  misc_feature (1)..(9): Table A2; Target 2847; AFP; ENSG00000081051; HLA-C*05:01;
QQDTLSNKI

SEQ ID NO: 105690 - protein, 9 aa, Homo sapiens
  misc_feature (1)..(9): Table A2; Target 2848; AFP; ENSG00000081051; HLA-C*06:02;
QQDTLSNKI

SEQ ID NO: 105691 - protein, 9 aa, Homo sapiens
  misc_feature (1)..(9): Table A2; Target 2849; AFP; ENSG00000081051; HLA-A*03:01;
QTKAATVTK

SEQ ID NO: 105692 - protein, 9 aa, Homo sapiens
  misc_feature (1)..(9): Table A2; Target 2850; AFP; ENSG00000081051; HLA-A*03:02;
QTKAATVTK

SEQ ID NO: 105693 - protein, 9 aa, Homo sapiens
  misc_feature (1)..(9): Table A2; Target 2851; AFP; ENSG00000081051; HLA-A*11:01;
QTKAATVTK

SEQ ID NO: 105694 - protein, 9 aa, Homo sapiens
  misc_feature (1)..(9): Table A2; Target 2852; AFP; ENSG00000081051; HLA-A*31:01;
QTKAATVTK

SEQ ID NO: 105695 - protein, 9 aa, Homo sapiens
  misc_feature (1)..(9): Table A2; Target 2853; AFP; ENSG00000081051; HLA-A*33:01;
QTKAATVTK

SEQ ID NO: 105696 - protein, 9 aa, Homo sapiens
  misc_feature (1)..(9): Table A2; Target 2854; AFP; ENSG00000081051; HLA-A*33:03;
QTKAATVTK

SEQ ID NO: 105697 - protein, 9 aa, Homo sapiens
  misc_feature (1)..(9): Table A2; Target 2855; AFP; ENSG00000081051; HLA-A*68:01;
QTKAATVTK

SEQ ID NO: 105698 - protein, 9 aa, Homo sapiens
  misc_feature (1)..(9): Table A2; Target 2856; AFP; ENSG00000081051; HLA-C*07:06;
QTKAATVTK

SEQ ID NO: 105699 - protein, 11 aa, Homo sapiens
  misc_feature (1)..(11): Table A2; Target 2857; AFP; ENSG00000081051; HLA-A*31:01;
QTMKQEFLINL

SEQ ID NO: 105700 - protein, 9 aa, Homo sapiens
  misc_feature (1)..(9): Table A2; Target 2858; AFP; ENSG00000081051; HLA-A*02:07;
QVPEPVTSC

SEQ ID NO: 105701 - protein, 9 aa, Homo sapiens
  misc_feature (1)..(9): Table A2; Target 2859; AFP; ENSG00000081051; HLA-A*25:01;
QVPEPVTSC

SEQ ID NO: 105702 - protein, 9 aa, Homo sapiens
  misc_feature (1)..(9): Table A2; Target 2860; AFP; ENSG00000081051; HLA-C*01:02;
QVPEPVTSC

SEQ ID NO: 105703 - protein, 8 aa, Homo sapiens
  misc_feature (1)..(8): Table A2; Target 2861; AFP; ENSG00000081051; HLA-B*37:01;
RETFMNKF

SEQ ID NO: 105704 - protein, 11 aa, Homo sapiens
  misc_feature (1)..(11): Table A2; Target 2862; AFP; ENSG00000081051; HLA-A*24:02;
RFLGDRDFNQF

SEQ ID NO: 105705 - protein, 11 aa, Homo sapiens
  misc_feature (1)..(11): Table A2; Target 2863; AFP; ENSG00000081051; HLA-A*03:01;
RTFQAITVTKL

SEQ ID NO: 105706 - protein, 11 aa, Homo sapiens
  misc_feature (1)..(11): Table A2; Target 2864; AFP; ENSG00000081051; HLA-B*57:01;
RTFQAITVTKL

SEQ ID NO: 105707 - protein, 10 aa, Homo sapiens
  misc_feature (1)..(10): Table A2; Target 2865; AFP; ENSG00000081051; HLA-A*03:01;
RTFQAITVTK

SEQ ID NO: 105708 - protein, 10 aa, Homo sapiens
  misc_feature (1)..(10): Table A2; Target 2866; AFP; ENSG00000081051; HLA-A*03:02;
RTFQAITVTK

SEQ ID NO: 105709 - protein, 10 aa, Homo sapiens
  misc_feature (1)..(10): Table A2; Target 2867; AFP; ENSG00000081051; HLA-A*11:01;
RTFQAITVTK

SEQ ID NO: 105710 - protein, 10 aa, Homo sapiens
  misc_feature (1)..(10): Table A2; Target 2868; AFP; ENSG00000081051; HLA-A*31:01;
RTFQAITVTK

SEQ ID NO: 105711 - protein, 10 aa, Homo sapiens
  misc_feature (1)..(10): Table A2; Target 2869; AFP; ENSG00000081051; HLA-B*27:02;
RTFQAITVTK

SEQ ID NO: 105712 - protein, 10 aa, Homo sapiens
  misc_feature (1)..(10): Table A2; Target 2870; AFP; ENSG00000081051; HLA-B*57:01;
RTFQAITVTK

SEQ ID NO: 105713 - protein, 9 aa, Homo sapiens
  misc_feature (1)..(9): Table A2; Target 2871; AFP; ENSG00000081051; HLA-B*37:01;
SEEGRHNCF

SEQ ID NO: 105714 - protein, 10 aa, Homo sapiens
  misc_feature (1)..(10): Table A2; Target 2872; AFP; ENSG00000081051; HLA-B*44:02;
SELMAITRKM

SEQ ID NO: 105715 - protein, 10 aa, Homo sapiens
  misc_feature (1)..(10): Table A2; Target 2873; AFP; ENSG00000081051; HLA-B*44:03;
SELMAITRKM

SEQ ID NO: 105716 - protein, 8 aa, Homo sapiens
  misc_feature (1)..(8): Table A2; Target 2874; AFP; ENSG00000081051; HLA-B*18:01;
SELMAITR

SEQ ID NO: 105717 - protein, 8 aa, Homo sapiens
  misc_feature (1)..(8): Table A2; Target 2875; AFP; ENSG00000081051; HLA-A*02:04;
SIFLIFLL

SEQ ID NO: 105718 - protein, 8 aa, Homo sapiens
  misc_feature (1)..(8): Table A2; Target 2876; AFP; ENSG00000081051; HLA-B*08:01;
SKMVKDAL

SEQ ID NO: 105719 - protein, 11 aa, Homo sapiens
  misc_feature (1)..(11): Table A2; Target 2877; AFP; ENSG00000081051; HLA-A*02:01;
SLADLATIFFA

SEQ ID NO: 105720 - protein, 11 aa, Homo sapiens
  misc_feature (1)..(11): Table A2; Target 2878; AFP; ENSG00000081051; HLA-A*02:04;
SLADLATIFFA

SEQ ID NO: 105721 - protein, 10 aa, Homo sapiens
  misc_feature (1)..(10): Table A2; Target 2879; AFP; ENSG00000081051; HLA-A*02:01;
SLADLATIFF

SEQ ID NO: 105722 - protein, 10 aa, Homo sapiens
  misc_feature (1)..(10): Table A2; Target 2880; AFP; ENSG00000081051; HLA-A*02:04;
SLADLATIFF

SEQ ID NO: 105723 - protein, 9 aa, Homo sapiens
  misc_feature (1)..(9): Table A2; Target 2881; AFP; ENSG00000081051; HLA-A*23:01;
SLADLATIF

SEQ ID NO: 105724 - protein, 9 aa, Homo sapiens
  misc_feature (1)..(9): Table A2; Target 2882; AFP; ENSG00000081051; HLA-A*24:02;
SLADLATIF

SEQ ID NO: 105725 - protein, 9 aa, Homo sapiens
  misc_feature (1)..(9): Table A2; Target 2883; AFP; ENSG00000081051; HLA-A*25:01;
SLADLATIF

SEQ ID NO: 105726 - protein, 9 aa, Homo sapiens
  misc_feature (1)..(9): Table A2; Target 2884; AFP; ENSG00000081051; HLA-A*26:01;
SLADLATIF

SEQ ID NO: 105727 - protein, 9 aa, Homo sapiens
  misc_feature (1)..(9): Table A2; Target 2885; AFP; ENSG00000081051; HLA-A*29:02;
SLADLATIF

SEQ ID NO: 105728 - protein, 9 aa, Homo sapiens
  misc_feature (1)..(9): Table A2; Target 2886; AFP; ENSG00000081051; HLA-A*32:01;
SLADLATIF

SEQ ID NO: 105729 - protein, 9 aa, Homo sapiens
  misc_feature (1)..(9): Table A2; Target 2887; AFP; ENSG00000081051; HLA-B*15:01;
SLADLATIF

SEQ ID NO: 105730 - protein, 9 aa, Homo sapiens
  misc_feature (1)..(9): Table A2; Target 2888; AFP; ENSG00000081051; HLA-B*15:03;
SLADLATIF

SEQ ID NO: 105731 - protein, 9 aa, Homo sapiens
  misc_feature (1)..(9): Table A2; Target 2889; AFP; ENSG00000081051; HLA-B*35:01;
SLADLATIF

SEQ ID NO: 105732 - protein, 9 aa, Homo sapiens
  misc_feature (1)..(9): Table A2; Target 2890; AFP; ENSG00000081051; HLA-B*44:02;
SLADLATIF

SEQ ID NO: 105733 - protein, 9 aa, Homo sapiens
  misc_feature (1)..(9): Table A2; Target 2891; AFP; ENSG00000081051; HLA-B*44:03;
SLADLATIF

SEQ ID NO: 105734 - protein, 9 aa, Homo sapiens
  misc_feature (1)..(9): Table A2; Target 2892; AFP; ENSG00000081051; HLA-B*46:01;
SLADLATIF

SEQ ID NO: 105735 - protein, 9 aa, Homo sapiens
  misc_feature (1)..(9): Table A2; Target 2893; AFP; ENSG00000081051; HLA-C*02:02;
SLADLATIF

SEQ ID NO: 105736 - protein, 9 aa, Homo sapiens
  misc_feature (1)..(9): Table A2; Target 2894; AFP; ENSG00000081051; HLA-C*07:04;
SLADLATIF

SEQ ID NO: 105737 - protein, 9 aa, Homo sapiens
  misc_feature (1)..(9): Table A2; Target 2895; AFP; ENSG00000081051; HLA-C*12:03;
SLADLATIF

SEQ ID NO: 105738 - protein, 8 aa, Homo sapiens
  misc_feature (1)..(8): Table A2; Target 2896; AFP; ENSG00000081051; HLA-A*02:01;
SLADLATI

SEQ ID NO: 105739 - protein, 10 aa, Homo sapiens
  misc_feature (1)..(10): Table A2; Target 2897; AFP; ENSG00000081051; HLA-A*02:01;
SLLNQHACAV

SEQ ID NO: 105740 - protein, 10 aa, Homo sapiens
  misc_feature (1)..(10): Table A2; Target 2898; AFP; ENSG00000081051; HLA-A*02:03;
SLLNQHACAV

SEQ ID NO: 105741 - protein, 9 aa, Homo sapiens
  misc_feature (1)..(9): Table A2; Target 2899; AFP; ENSG00000081051; HLA-A*02:01;
SLVVDETYV

SEQ ID NO: 105742 - protein, 8 aa, Homo sapiens
  misc_feature (1)..(8): Table A2; Target 2900; AFP; ENSG00000081051; HLA-B*15:01;
SLVVDETY

SEQ ID NO: 105743 - protein, 8 aa, Homo sapiens
  misc_feature (1)..(8): Table A2; Target 2901; AFP; ENSG00000081051; HLA-B*15:03;
SLVVDETY

SEQ ID NO: 105744 - protein, 8 aa, Homo sapiens
  misc_feature (1)..(8): Table A2; Target 2902; AFP; ENSG00000081051; HLA-B*07:02;
SPNLNRFL

SEQ ID NO: 105745 - protein, 9 aa, Homo sapiens
  misc_feature (1)..(9): Table A2; Target 2903; AFP; ENSG00000081051; HLA-A*32:01;
SQKFTKVNF

SEQ ID NO: 105746 - protein, 9 aa, Homo sapiens
  misc_feature (1)..(9): Table A2; Target 2904; AFP; ENSG00000081051; HLA-B*15:01;
SQKFTKVNF

SEQ ID NO: 105747 - protein, 9 aa, Homo sapiens
  misc_feature (1)..(9): Table A2; Target 2905; AFP; ENSG00000081051; HLA-B*15:03;
SQKFTKVNF

SEQ ID NO: 105748 - protein, 9 aa, Homo sapiens
  misc_feature (1)..(9): Table A2; Target 2906; AFP; ENSG00000081051; HLA-C*07:04;
SQKFTKVNF

SEQ ID NO: 105749 - protein, 10 aa, Homo sapiens
  misc_feature (1)..(10): Table A2; Target 2907; AFP; ENSG00000081051; HLA-B*13:02;
SQQDTLSNKI

SEQ ID NO: 105750 - protein, 10 aa, Homo sapiens
  misc_feature (1)..(10): Table A2; Target 2908; AFP; ENSG00000081051; HLA-B*38:01;
SQQDTLSNKI

SEQ ID NO: 105751 - protein, 9 aa, Homo sapiens
  misc_feature (1)..(9): Table A2; Target 2909; AFP; ENSG00000081051; HLA-A*03:02;
SQQDTLSNK

SEQ ID NO: 105752 - protein, 9 aa, Homo sapiens
  misc_feature (1)..(9): Table A2; Target 2910; AFP; ENSG00000081051; HLA-A*11:01;
SQQDTLSNK

SEQ ID NO: 105753 - protein, 10 aa, Homo sapiens
  misc_feature (1)..(10): Table A2; Target 2911; AFP; ENSG00000081051; HLA-A*11:01;
SSELMAITRK

SEQ ID NO: 105754 - protein, 9 aa, Homo sapiens
  misc_feature (1)..(9): Table A2; Target 2912; AFP; ENSG00000081051; HLA-A*11:01;
SSELMAITR

SEQ ID NO: 105755 - protein, 9 aa, Homo sapiens
  misc_feature (1)..(9): Table A2; Target 2913; AFP; ENSG00000081051; HLA-A*68:01;
SSELMAITR

SEQ ID NO: 105756 - protein, 9 aa, Homo sapiens
  misc_feature (1)..(9): Table A2; Target 2914; AFP; ENSG00000081051; HLA-C*07:06;
SSELMAITR

SEQ ID NO: 105757 - protein, 8 aa, Homo sapiens
  misc_feature (1)..(8): Table A2; Target 2915; AFP; ENSG00000081051; HLA-C*16:01;
SSGEKNIF

SEQ ID NO: 105758 - protein, 9 aa, Homo sapiens
  misc_feature (1)..(9): Table A2; Target 2916; AFP; ENSG00000081051; HLA-A*01:01;
SSLVVDETY

SEQ ID NO: 105759 - protein, 9 aa, Homo sapiens
  misc_feature (1)..(9): Table A2; Target 2917; AFP; ENSG00000081051; HLA-A*30:02;
SSLVVDETY

SEQ ID NO: 105760 - protein, 9 aa, Homo sapiens
  misc_feature (1)..(9): Table A2; Target 2918; AFP; ENSG00000081051; HLA-B*15:01;
SSLVVDETY

SEQ ID NO: 105761 - protein, 9 aa, Homo sapiens
  misc_feature (1)..(9): Table A2; Target 2919; AFP; ENSG00000081051; HLA-B*15:03;
SSLVVDETY

SEQ ID NO: 105762 - protein, 9 aa, Homo sapiens
  misc_feature (1)..(9): Table A2; Target 2920; AFP; ENSG00000081051; HLA-B*35:01;
SSLVVDETY

SEQ ID NO: 105763 - protein, 9 aa, Homo sapiens
  misc_feature (1)..(9): Table A2; Target 2921; AFP; ENSG00000081051; HLA-B*46:01;
SSLVVDETY

SEQ ID NO: 105764 - protein, 9 aa, Homo sapiens
  misc_feature (1)..(9): Table A2; Target 2922; AFP; ENSG00000081051; HLA-B*57:01;
SSLVVDETY

SEQ ID NO: 105765 - protein, 9 aa, Homo sapiens
  misc_feature (1)..(9): Table A2; Target 2923; AFP; ENSG00000081051; HLA-B*58:01;
SSLVVDETY

SEQ ID NO: 105766 - protein, 9 aa, Homo sapiens
  misc_feature (1)..(9): Table A2; Target 2924; AFP; ENSG00000081051; HLA-C*01:02;
SSLVVDETY

SEQ ID NO: 105767 - protein, 9 aa, Homo sapiens
  misc_feature (1)..(9): Table A2; Target 2925; AFP; ENSG00000081051; HLA-C*16:04;
SSLVVDETY

SEQ ID NO: 105768 - protein, 9 aa, Homo sapiens
  misc_feature (1)..(9): Table A2; Target 2926; AFP; ENSG00000081051; HLA-A*24:02;
SYANRRPCF

SEQ ID NO: 105769 - protein, 10 aa, Homo sapiens
  misc_feature (1)..(10): Table A2; Target 2927; AFP; ENSG00000081051; HLA-A*23:01;
SYICSQQDTL

SEQ ID NO: 105770 - protein, 10 aa, Homo sapiens
  misc_feature (1)..(10): Table A2; Target 2928; AFP; ENSG00000081051; HLA-A*24:02;
SYICSQQDTL

SEQ ID NO: 105771 - protein, 10 aa, Homo sapiens
  misc_feature (1)..(10): Table A2; Target 2929; AFP; ENSG00000081051; HLA-C*14:02;
SYICSQQDTL

SEQ ID NO: 105772 - protein, 10 aa, Homo sapiens
  misc_feature (1)..(10): Table A2; Target 2930; AFP; ENSG00000081051; HLA-C*14:02;
SYQCTAEISL

SEQ ID NO: 105773 - protein, 8 aa, Homo sapiens
  misc_feature (1)..(8): Table A2; Target 2931; AFP; ENSG00000081051; HLA-C*14:02;
SYQCTAEI

SEQ ID NO: 105774 - protein, 9 aa, Homo sapiens
  misc_feature (1)..(9): Table A2; Target 2932; AFP; ENSG00000081051; HLA-C*05:01;
TAEISLADL

SEQ ID NO: 105775 - protein, 9 aa, Homo sapiens
  misc_feature (1)..(9): Table A2; Target 2933; AFP; ENSG00000081051; HLA-B*40:02;
TECCKLTTL

SEQ ID NO: 105776 - protein, 9 aa, Homo sapiens
  misc_feature (1)..(9): Table A2; Target 2934; AFP; ENSG00000081051; HLA-B*40:01;
TEEQLEAVI

SEQ ID NO: 105777 - protein, 9 aa, Homo sapiens
  misc_feature (1)..(9): Table A2; Target 2935; AFP; ENSG00000081051; HLA-B*49:01;
TEEQLEAVI

SEQ ID NO: 105778 - protein, 10 aa, Homo sapiens
  misc_feature (1)..(10): Table A2; Target 2936; AFP; ENSG00000081051; HLA-B*49:01;
TEIQKLVLDV

SEQ ID NO: 105779 - protein, 8 aa, Homo sapiens
  misc_feature (1)..(8): Table A2; Target 2937; AFP; ENSG00000081051; HLA-A*30:01;
TEIQKLVL

SEQ ID NO: 105780 - protein, 8 aa, Homo sapiens
  misc_feature (1)..(8): Table A2; Target 2938; AFP; ENSG00000081051; HLA-B*08:01;
TEIQKLVL

SEQ ID NO: 105781 - protein, 8 aa, Homo sapiens
  misc_feature (1)..(8): Table A2; Target 2939; AFP; ENSG00000081051; HLA-B*18:01;
TEIQKLVL

SEQ ID NO: 105782 - protein, 8 aa, Homo sapiens
  misc_feature (1)..(8): Table A2; Target 2940; AFP; ENSG00000081051; HLA-B*37:01;
TEIQKLVL

SEQ ID NO: 105783 - protein, 8 aa, Homo sapiens
  misc_feature (1)..(8): Table A2; Target 2941; AFP; ENSG00000081051; HLA-B*40:01;
TEIQKLVL

SEQ ID NO: 105784 - protein, 8 aa, Homo sapiens
  misc_feature (1)..(8): Table A2; Target 2942; AFP; ENSG00000081051; HLA-B*40:02;
TEIQKLVL

SEQ ID NO: 105785 - protein, 8 aa, Homo sapiens
  misc_feature (1)..(8): Table A2; Target 2943; AFP; ENSG00000081051; HLA-B*49:01;
TEIQKLVL

SEQ ID NO: 105786 - protein, 10 aa, Homo sapiens
  misc_feature (1)..(10): Table A2; Target 2944; AFP; ENSG00000081051; HLA-B*27:02;
TENPLECQDK

SEQ ID NO: 105787 - protein, 10 aa, Homo sapiens
  misc_feature (1)..(10): Table A2; Target 2945; AFP; ENSG00000081051; HLA-A*23:01;
TFQAITVTKL

SEQ ID NO: 105788 - protein, 10 aa, Homo sapiens
  misc_feature (1)..(10): Table A2; Target 2946; AFP; ENSG00000081051; HLA-A*33:03;
TFQAITVTKL

SEQ ID NO: 105789 - protein, 10 aa, Homo sapiens
  misc_feature (1)..(10): Table A2; Target 2947; AFP; ENSG00000081051; HLA-C*14:02;
TFQAITVTKL

SEQ ID NO: 105790 - protein, 9 aa, Homo sapiens
  misc_feature (1)..(9): Table A2; Target 2948; AFP; ENSG00000081051; HLA-A*03:02;
TFQAITVTK

SEQ ID NO: 105791 - protein, 9 aa, Homo sapiens
  misc_feature (1)..(9): Table A2; Target 2949; AFP; ENSG00000081051; HLA-A*23:01;
TFQAITVTK

SEQ ID NO: 105792 - protein, 9 aa, Homo sapiens
  misc_feature (1)..(9): Table A2; Target 2950; AFP; ENSG00000081051; HLA-A*33:01;
TFQAITVTK

SEQ ID NO: 105793 - protein, 9 aa, Homo sapiens
  misc_feature (1)..(9): Table A2; Target 2951; AFP; ENSG00000081051; HLA-A*33:03;
TFQAITVTK

SEQ ID NO: 105794 - protein, 9 aa, Homo sapiens
  misc_feature (1)..(9): Table A2; Target 2952; AFP; ENSG00000081051; HLA-C*14:02;
TFQAITVTK

SEQ ID NO: 105795 - protein, 10 aa, Homo sapiens
  misc_feature (1)..(10): Table A2; Target 2953; AFP; ENSG00000081051; HLA-C*05:01;
TGDEQSSGCL

SEQ ID NO: 105796 - protein, 9 aa, Homo sapiens
  misc_feature (1)..(9): Table A2; Target 2954; AFP; ENSG00000081051; HLA-A*29:02;
TILLWAARY

SEQ ID NO: 105797 - protein, 9 aa, Homo sapiens
  misc_feature (1)..(9): Table A2; Target 2955; AFP; ENSG00000081051; HLA-A*02:01;
TLSNKITEC

SEQ ID NO: 105798 - protein, 9 aa, Homo sapiens
  misc_feature (1)..(9): Table A2; Target 2956; AFP; ENSG00000081051; HLA-A*02:03;
TLSNKITEC

SEQ ID NO: 105799 - protein, 9 aa, Homo sapiens
  misc_feature (1)..(9): Table A2; Target 2957; AFP; ENSG00000081051; HLA-A*02:04;
TLSNKITEC

SEQ ID NO: 105800 - protein, 9 aa, Homo sapiens
  misc_feature (1)..(9): Table A2; Target 2958; AFP; ENSG00000081051; HLA-B*55:01;
TLSNKITEC

SEQ ID NO: 105801 - protein, 10 aa, Homo sapiens
  misc_feature (1)..(10): Table A2; Target 2959; AFP; ENSG00000081051; HLA-A*02:03;
TMKQEFLINL

SEQ ID NO: 105802 - protein, 10 aa, Homo sapiens
  misc_feature (1)..(10): Table A2; Target 2960; AFP; ENSG00000081051; HLA-B*56:01;
TPASIPLFQV

SEQ ID NO: 105803 - protein, 10 aa, Homo sapiens
  misc_feature (1)..(10): Table A2; Target 2961; AFP; ENSG00000081051; HLA-B*56:01;
TPVNPGVGQC

SEQ ID NO: 105804 - protein, 9 aa, Homo sapiens
  misc_feature (1)..(9): Table A2; Target 2962; AFP; ENSG00000081051; HLA-B*35:01;
TPVNPGVGQ

SEQ ID NO: 105805 - protein, 9 aa, Homo sapiens
  misc_feature (1)..(9): Table A2; Target 2963; AFP; ENSG00000081051; HLA-B*56:01;
TPVNPGVGQ

SEQ ID NO: 105806 - protein, 11 aa, Homo sapiens
  misc_feature (1)..(11): Table A2; Target 2964; AFP; ENSG00000081051; HLA-B*27:05;
TRTFQAITVTK

SEQ ID NO: 105807 - protein, 9 aa, Homo sapiens
  misc_feature (1)..(9): Table A2; Target 2965; AFP; ENSG00000081051; HLA-B*27:05;
TRTFQAITV

SEQ ID NO: 105808 - protein, 9 aa, Homo sapiens
  misc_feature (1)..(9): Table A2; Target 2966; AFP; ENSG00000081051; HLA-C*06:02;
TRTFQAITV

SEQ ID NO: 105809 - protein, 11 aa, Homo sapiens
  misc_feature (1)..(11): Table A2; Target 2967; AFP; ENSG00000081051; HLA-A*11:01;
TSSELMAITRK

SEQ ID NO: 105810 - protein, 10 aa, Homo sapiens
  misc_feature (1)..(10): Table A2; Target 2968; AFP; ENSG00000081051; HLA-A*11:01;
TSSELMAITR

SEQ ID NO: 105811 - protein, 10 aa, Homo sapiens
  misc_feature (1)..(10): Table A2; Target 2969; AFP; ENSG00000081051; HLA-A*31:01;
TSSELMAITR

SEQ ID NO: 105812 - protein, 10 aa, Homo sapiens
  misc_feature (1)..(10): Table A2; Target 2970; AFP; ENSG00000081051; HLA-A*33:01;
TSSELMAITR

SEQ ID NO: 105813 - protein, 10 aa, Homo sapiens
  misc_feature (1)..(10): Table A2; Target 2971; AFP; ENSG00000081051; HLA-A*33:03;
TSSELMAITR

SEQ ID NO: 105814 - protein, 10 aa, Homo sapiens
  misc_feature (1)..(10): Table A2; Target 2972; AFP; ENSG00000081051; HLA-A*68:01;
TSSELMAITR

SEQ ID NO: 105815 - protein, 10 aa, Homo sapiens
  misc_feature (1)..(10): Table A2; Target 2973; AFP; ENSG00000081051; HLA-A*68:02;
TSSELMAITR

SEQ ID NO: 105816 - protein, 10 aa, Homo sapiens
  misc_feature (1)..(10): Table A2; Target 2974; AFP; ENSG00000081051; HLA-B*27:02;
TSSELMAITR

SEQ ID NO: 105817 - protein, 10 aa, Homo sapiens
  misc_feature (1)..(10): Table A2; Target 2975; AFP; ENSG00000081051; HLA-B*57:01;
TSSELMAITR

SEQ ID NO: 105818 - protein, 10 aa, Homo sapiens
  misc_feature (1)..(10): Table A2; Target 2976; AFP; ENSG00000081051; HLA-C*07:06;
TSSELMAITR

SEQ ID NO: 105819 - protein, 9 aa, Homo sapiens
  misc_feature (1)..(9): Table A2; Target 2977; AFP; ENSG00000081051; HLA-A*25:01;
TVTKLSQKF

SEQ ID NO: 105820 - protein, 9 aa, Homo sapiens
  misc_feature (1)..(9): Table A2; Target 2978; AFP; ENSG00000081051; HLA-A*26:01;
TVTKLSQKF

SEQ ID NO: 105821 - protein, 9 aa, Homo sapiens
  misc_feature (1)..(9): Table A2; Target 2979; AFP; ENSG00000081051; HLA-A*32:01;
TVTKLSQKF

SEQ ID NO: 105822 - protein, 9 aa, Homo sapiens
  misc_feature (1)..(9): Table A2; Target 2980; AFP; ENSG00000081051; HLA-B*35:01;
TVTKLSQKF

SEQ ID NO: 105823 - protein, 9 aa, Homo sapiens
  misc_feature (1)..(9): Table A2; Target 2981; AFP; ENSG00000081051; HLA-B*44:03;
TVTKLSQKF

SEQ ID NO: 105824 - protein, 9 aa, Homo sapiens
  misc_feature (1)..(9): Table A2; Target 2982; AFP; ENSG00000081051; HLA-B*58:01;
TVTKLSQKF

SEQ ID NO: 105825 - protein, 8 aa, Homo sapiens
  misc_feature (1)..(8): Table A2; Target 2983; AFP; ENSG00000081051; HLA-A*03:02;
TVTKLSQK

SEQ ID NO: 105826 - protein, 10 aa, Homo sapiens
  misc_feature (1)..(10): Table A2; Target 2984; AFP; ENSG00000081051; HLA-A*31:01;
TYKEVSKMVK

SEQ ID NO: 105827 - protein, 10 aa, Homo sapiens
  misc_feature (1)..(10): Table A2; Target 2985; AFP; ENSG00000081051; HLA-A*33:01;
TYKEVSKMVK

SEQ ID NO: 105828 - protein, 10 aa, Homo sapiens
  misc_feature (1)..(10): Table A2; Target 2986; AFP; ENSG00000081051; HLA-A*33:03;
TYKEVSKMVK

SEQ ID NO: 105829 - protein, 10 aa, Homo sapiens
  misc_feature (1)..(10): Table A2; Target 2987; AFP; ENSG00000081051; HLA-C*04:01;
TYKEVSKMVK

SEQ ID NO: 105830 - protein, 10 aa, Homo sapiens
  misc_feature (1)..(10): Table A2; Target 2988; AFP; ENSG00000081051; HLA-C*06:02;
TYKEVSKMVK

SEQ ID NO: 105831 - protein, 9 aa, Homo sapiens
  misc_feature (1)..(9): Table A2; Target 2989; AFP; ENSG00000081051; HLA-A*24:02;
TYKEVSKMV

SEQ ID NO: 105832 - protein, 9 aa, Homo sapiens
  misc_feature (1)..(9): Table A2; Target 2990; AFP; ENSG00000081051; HLA-C*06:02;
TYKEVSKMV

SEQ ID NO: 105833 - protein, 9 aa, Homo sapiens
  misc_feature (1)..(9): Table A2; Target 2991; AFP; ENSG00000081051; HLA-C*16:02;
TYKEVSKMV

SEQ ID NO: 105834 - protein, 8 aa, Homo sapiens
  misc_feature (1)..(8): Table A2; Target 2992; AFP; ENSG00000081051; HLA-B*08:01;
TYKEVSKM

SEQ ID NO: 105835 - protein, 8 aa, Homo sapiens
  misc_feature (1)..(8): Table A2; Target 2993; AFP; ENSG00000081051; HLA-C*14:02;
TYKEVSKM

SEQ ID NO: 105836 - protein, 9 aa, Homo sapiens
  misc_feature (1)..(9): Table A2; Target 2994; AFP; ENSG00000081051; HLA-A*23:01;
VAKGYQELL

SEQ ID NO: 105837 - protein, 9 aa, Homo sapiens
  misc_feature (1)..(9): Table A2; Target 2995; AFP; ENSG00000081051; HLA-B*46:01;
VAKGYQELL

SEQ ID NO: 105838 - protein, 9 aa, Homo sapiens
  misc_feature (1)..(9): Table A2; Target 2996; AFP; ENSG00000081051; HLA-C*02:02;
VAKGYQELL

SEQ ID NO: 105839 - protein, 9 aa, Homo sapiens
  misc_feature (1)..(9): Table A2; Target 2997; AFP; ENSG00000081051; HLA-C*07:04;
VAKGYQELL

SEQ ID NO: 105840 - protein, 9 aa, Homo sapiens
  misc_feature (1)..(9): Table A2; Target 2998; AFP; ENSG00000081051; HLA-C*12:03;
VAKGYQELL

SEQ ID NO: 105841 - protein, 9 aa, Homo sapiens
  misc_feature (1)..(9): Table A2; Target 2999; AFP; ENSG00000081051; HLA-C*16:02;
VAKGYQELL

SEQ ID NO: 105842 - protein, 8 aa, Homo sapiens
  misc_feature (1)..(8): Table A2; Target 3000; AFP; ENSG00000081051; HLA-B*08:01;
VAKGYQEL

SEQ ID NO: 105843 - protein, 8 aa, Homo sapiens
  misc_feature (1)..(8): Table A2; Target 3001; AFP; ENSG00000081051; HLA-B*46:01;
VAKGYQEL

SEQ ID NO: 105844 - protein, 8 aa, Homo sapiens
  misc_feature (1)..(8): Table A2; Target 3002; AFP; ENSG00000081051; HLA-C*03:04;
VAKGYQEL

SEQ ID NO: 105845 - protein, 8 aa, Homo sapiens
  misc_feature (1)..(8): Table A2; Target 3003; AFP; ENSG00000081051; HLA-C*16:01;
VAKGYQEL

SEQ ID NO: 105846 - protein, 11 aa, Homo sapiens
  misc_feature (1)..(11): Table A2; Target 3004; AFP; ENSG00000081051; HLA-B*49:01;
VECFQTKAATV

SEQ ID NO: 105847 - protein, 8 aa, Homo sapiens
  misc_feature (1)..(8): Table A2; Target 3005; AFP; ENSG00000081051; HLA-B*18:01;
VESIFLIF

SEQ ID NO: 105848 - protein, 8 aa, Homo sapiens
  misc_feature (1)..(8): Table A2; Target 3006; AFP; ENSG00000081051; HLA-B*37:01;
VESIFLIF

SEQ ID NO: 105849 - protein, 9 aa, Homo sapiens
  misc_feature (1)..(9): Table A2; Target 3007; AFP; ENSG00000081051; HLA-B*46:01;
VGQCCTSSY

SEQ ID NO: 105850 - protein, 9 aa, Homo sapiens
  misc_feature (1)..(9): Table A2; Target 3008; AFP; ENSG00000081051; HLA-C*14:02;
VGQCCTSSY

SEQ ID NO: 105851 - protein, 11 aa, Homo sapiens
  misc_feature (1)..(11): Table A2; Target 3009; AFP; ENSG00000081051; HLA-A*03:01;
VIADFSGLLEK

SEQ ID NO: 105852 - protein, 11 aa, Homo sapiens
  misc_feature (1)..(11): Table A2; Target 3010; AFP; ENSG00000081051; HLA-A*03:02;
VIADFSGLLEK

SEQ ID NO: 105853 - protein, 11 aa, Homo sapiens
  misc_feature (1)..(11): Table A2; Target 3011; AFP; ENSG00000081051; HLA-A*11:01;
VIADFSGLLEK

SEQ ID NO: 105854 - protein, 11 aa, Homo sapiens
  misc_feature (1)..(11): Table A2; Target 3012; AFP; ENSG00000081051; HLA-A*31:01;
VIADFSGLLEK

SEQ ID NO: 105855 - protein, 11 aa, Homo sapiens
  misc_feature (1)..(11): Table A2; Target 3013; AFP; ENSG00000081051; HLA-A*33:01;
VIADFSGLLEK

SEQ ID NO: 105856 - protein, 11 aa, Homo sapiens
  misc_feature (1)..(11): Table A2; Target 3014; AFP; ENSG00000081051; HLA-B*27:02;
VIADFSGLLEK

SEQ ID NO: 105857 - protein, 9 aa, Homo sapiens
  misc_feature (1)..(9): Table A2; Target 3015; AFP; ENSG00000081051; HLA-A*02:03;
VIADFSGLL

SEQ ID NO: 105858 - protein, 9 aa, Homo sapiens
  misc_feature (1)..(9): Table A2; Target 3016; AFP; ENSG00000081051; HLA-A*03:01;
VIADFSGLL

SEQ ID NO: 105859 - protein, 9 aa, Homo sapiens
  misc_feature (1)..(9): Table A2; Target 3017; AFP; ENSG00000081051; HLA-A*23:01;
VIADFSGLL

SEQ ID NO: 105860 - protein, 9 aa, Homo sapiens
  misc_feature (1)..(9): Table A2; Target 3018; AFP; ENSG00000081051; HLA-A*24:02;
VIADFSGLL

SEQ ID NO: 105861 - protein, 9 aa, Homo sapiens
  misc_feature (1)..(9): Table A2; Target 3019; AFP; ENSG00000081051; HLA-A*26:01;
VIADFSGLL

SEQ ID NO: 105862 - protein, 9 aa, Homo sapiens
  misc_feature (1)..(9): Table A2; Target 3020; AFP; ENSG00000081051; HLA-A*68:02;
VIADFSGLL

SEQ ID NO: 105863 - protein, 9 aa, Homo sapiens
  misc_feature (1)..(9): Table A2; Target 3021; AFP; ENSG00000081051; HLA-B*13:02;
VIADFSGLL

SEQ ID NO: 105864 - protein, 9 aa, Homo sapiens
  misc_feature (1)..(9): Table A2; Target 3022; AFP; ENSG00000081051; HLA-B*27:05;
VIADFSGLL

SEQ ID NO: 105865 - protein, 9 aa, Homo sapiens
  misc_feature (1)..(9): Table A2; Target 3023; AFP; ENSG00000081051; HLA-C*03:03;
VIADFSGLL

SEQ ID NO: 105866 - protein, 9 aa, Homo sapiens
  misc_feature (1)..(9): Table A2; Target 3024; AFP; ENSG00000081051; HLA-C*03:04;
VIADFSGLL

SEQ ID NO: 105867 - protein, 9 aa, Homo sapiens
  misc_feature (1)..(9): Table A2; Target 3025; AFP; ENSG00000081051; HLA-C*07:04;
VIADFSGLL

SEQ ID NO: 105868 - protein, 8 aa, Homo sapiens
  misc_feature (1)..(8): Table A2; Target 3026; AFP; ENSG00000081051; HLA-C*01:02;
VIADFSGL

SEQ ID NO: 105869 - protein, 8 aa, Homo sapiens
  misc_feature (1)..(8): Table A2; Target 3027; AFP; ENSG00000081051; HLA-C*05:01;
VIADFSGL

SEQ ID NO: 105870 - protein, 9 aa, Homo sapiens
  misc_feature (1)..(9): Table A2; Target 3028; AFP; ENSG00000081051; HLA-A*29:02;
VILRVAKGY

SEQ ID NO: 105871 - protein, 10 aa, Homo sapiens
  misc_feature (1)..(10): Table A2; Target 3029; AFP; ENSG00000081051; HLA-A*01:01;
VLDVAHVHEH

SEQ ID NO: 105872 - protein, 8 aa, Homo sapiens
  misc_feature (1)..(8): Table A2; Target 3030; AFP; ENSG00000081051; HLA-C*04:01;
VLDVAHVH

SEQ ID NO: 105873 - protein, 10 aa, Homo sapiens
  misc_feature (1)..(10): Table A2; Target 3031; AFP; ENSG00000081051; HLA-A*24:02;
VMKNFGTRTF

SEQ ID NO: 105874 - protein, 10 aa, Homo sapiens
  misc_feature (1)..(10): Table A2; Target 3032; AFP; ENSG00000081051; HLA-A*32:01;
VMKNFGTRTF

SEQ ID NO: 105875 - protein, 10 aa, Homo sapiens
  misc_feature (1)..(10): Table A2; Target 3033; AFP; ENSG00000081051; HLA-B*46:01;
VMKNFGTRTF

SEQ ID NO: 105876 - protein, 10 aa, Homo sapiens
  misc_feature (1)..(10): Table A2; Target 3034; AFP; ENSG00000081051; HLA-B*57:01;
VMKNFGTRTF

SEQ ID NO: 105877 - protein, 8 aa, Homo sapiens
  misc_feature (1)..(8): Table A2; Target 3035; AFP; ENSG00000081051; HLA-A*31:01;
VMKNFGTR

SEQ ID NO: 105878 - protein, 8 aa, Homo sapiens
  misc_feature (1)..(8): Table A2; Target 3036; AFP; ENSG00000081051; HLA-A*33:01;
VMKNFGTR

SEQ ID NO: 105879 - protein, 9 aa, Homo sapiens
  misc_feature (1)..(9): Table A2; Target 3037; AFP; ENSG00000081051; HLA-A*02:04;
VNFTEIQKL

SEQ ID NO: 105880 - protein, 9 aa, Homo sapiens
  misc_feature (1)..(9): Table A2; Target 3038; AFP; ENSG00000081051; HLA-A*23:01;
VNFTEIQKL

SEQ ID NO: 105881 - protein, 9 aa, Homo sapiens
  misc_feature (1)..(9): Table A2; Target 3039; AFP; ENSG00000081051; HLA-C*12:03;
VNFTEIQKL

SEQ ID NO: 105882 - protein, 11 aa, Homo sapiens
  misc_feature (1)..(11): Table A2; Target 3040; AFP; ENSG00000081051; HLA-A*01:01;
VPEPVTSCEAY

SEQ ID NO: 105883 - protein, 11 aa, Homo sapiens
  misc_feature (1)..(11): Table A2; Target 3041; AFP; ENSG00000081051; HLA-B*35:01;
VPEPVTSCEAY

SEQ ID NO: 105884 - protein, 11 aa, Homo sapiens
  misc_feature (1)..(11): Table A2; Target 3042; AFP; ENSG00000081051; HLA-B*55:01;
VPEPVTSCEAY

SEQ ID NO: 105885 - protein, 10 aa, Homo sapiens
  misc_feature (1)..(10): Table A2; Target 3043; AFP; ENSG00000081051; HLA-B*56:01;
VPEPVTSCEA

SEQ ID NO: 105886 - protein, 8 aa, Homo sapiens
  misc_feature (1)..(8): Table A2; Target 3044; AFP; ENSG00000081051; HLA-B*56:01;
VPEPVTSC

SEQ ID NO: 105887 - protein, 11 aa, Homo sapiens
  misc_feature (1)..(11): Table A2; Target 3045; AFP; ENSG00000081051; HLA-A*03:02;
VQEATYKEVSK

SEQ ID NO: 105888 - protein, 9 aa, Homo sapiens
  misc_feature (1)..(9): Table A2; Target 3046; AFP; ENSG00000081051; HLA-B*13:02;
VQEATYKEV

SEQ ID NO: 105889 - protein, 9 aa, Homo sapiens
  misc_feature (1)..(9): Table A2; Target 3047; AFP; ENSG00000081051; HLA-B*40:02;
VQEATYKEV

SEQ ID NO: 105890 - protein, 9 aa, Homo sapiens
  misc_feature (1)..(9): Table A2; Target 3048; AFP; ENSG00000081051; HLA-C*05:01;
VQEATYKEV

SEQ ID NO: 105891 - protein, 9 aa, Homo sapiens
  misc_feature (1)..(9): Table A2; Target 3049; AFP; ENSG00000081051; HLA-C*06:02;
VQEATYKEV

SEQ ID NO: 105892 - protein, 9 aa, Homo sapiens
  misc_feature (1)..(9): Table A2; Target 3050; AFP; ENSG00000081051; HLA-C*16:02;
VQEATYKEV

SEQ ID NO: 105893 - protein, 9 aa, Homo sapiens
  misc_feature (1)..(9): Table A2; Target 3051; AFP; ENSG00000081051; HLA-C*01:02;
VSKMVKDAL

SEQ ID NO: 105894 - protein, 10 aa, Homo sapiens
  misc_feature (1)..(10): Table A2; Target 3052; AFP; ENSG00000081051; HLA-B*08:01;
VTKELRESSL

SEQ ID NO: 105895 - protein, 10 aa, Homo sapiens
  misc_feature (1)..(10): Table A2; Target 3053; AFP; ENSG00000081051; HLA-C*01:02;
VTKELRESSL

SEQ ID NO: 105896 - protein, 8 aa, Homo sapiens
  misc_feature (1)..(8): Table A2; Target 3054; AFP; ENSG00000081051; HLA-A*23:01;
VTKLSQKF

SEQ ID NO: 105897 - protein, 8 aa, Homo sapiens
  misc_feature (1)..(8): Table A2; Target 3055; AFP; ENSG00000081051; HLA-B*57:01;
VTKLSQKF

SEQ ID NO: 105898 - protein, 11 aa, Homo sapiens
  misc_feature (1)..(11): Table A2; Target 3056; AFP; ENSG00000081051; HLA-A*02:07;
VVDETYVPPAF

SEQ ID NO: 105899 - protein, 11 aa, Homo sapiens
  misc_feature (1)..(11): Table A2; Target 3057; AFP; ENSG00000081051; HLA-B*27:02;
VVDETYVPPAF

SEQ ID NO: 105900 - protein, 11 aa, Homo sapiens
  misc_feature (1)..(11): Table A2; Target 3058; AFP; ENSG00000081051; HLA-B*38:01;
VVDETYVPPAF

SEQ ID NO: 105901 - protein, 11 aa, Homo sapiens
  misc_feature (1)..(11): Table A2; Target 3059; AFP; ENSG00000081051; HLA-C*05:01;
VVDETYVPPAF

SEQ ID NO: 105902 - protein, 9 aa, Homo sapiens
  misc_feature (1)..(9): Table A2; Target 3060; AFP; ENSG00000081051; HLA-C*05:01;
VVDETYVPP

SEQ ID NO: 105903 - protein, 8 aa, Homo sapiens
  misc_feature (1)..(8): Table A2; Target 3061; AFP; ENSG00000081051; HLA-B*51:01;
YAPTILLW

SEQ ID NO: 105904 - protein, 9 aa, Homo sapiens
  misc_feature (1)..(9): Table A2; Target 3062; AFP; ENSG00000081051; HLA-A*30:01;
YEEDRETFM

SEQ ID NO: 105905 - protein, 9 aa, Homo sapiens
  misc_feature (1)..(9): Table A2; Target 3063; AFP; ENSG00000081051; HLA-B*37:01;
YEEDRETFM

SEQ ID NO: 105906 - protein, 9 aa, Homo sapiens
  misc_feature (1)..(9): Table A2; Target 3064; AFP; ENSG00000081051; HLA-B*40:01;
YEEDRETFM

SEQ ID NO: 105907 - protein, 9 aa, Homo sapiens
  misc_feature (1)..(9): Table A2; Target 3065; AFP; ENSG00000081051; HLA-B*40:02;
YEEDRETFM

SEQ ID NO: 105908 - protein, 9 aa, Homo sapiens
  misc_feature (1)..(9): Table A2; Target 3066; AFP; ENSG00000081051; HLA-B*44:02;
YEEDRETFM

SEQ ID NO: 105909 - protein, 9 aa, Homo sapiens
  misc_feature (1)..(9): Table A2; Target 3067; AFP; ENSG00000081051; HLA-B*49:01;
YEEDRETFM

SEQ ID NO: 105910 - protein, 9 aa, Homo sapiens
  misc_feature (1)..(9): Table A2; Target 3068; AFP; ENSG00000081051; HLA-C*05:01;
YEEDRETFM

SEQ ID NO: 105911 - protein, 9 aa, Homo sapiens
  misc_feature (1)..(9): Table A2; Target 3069; AFP; ENSG00000081051; HLA-C*16:04;
YEEDRETFM

SEQ ID NO: 105912 - protein, 8 aa, Homo sapiens
  misc_feature (1)..(8): Table A2; Target 3070; AFP; ENSG00000081051; HLA-B*18:01;
YEEDRETF

SEQ ID NO: 105913 - protein, 8 aa, Homo sapiens
  misc_feature (1)..(8): Table A2; Target 3071; AFP; ENSG00000081051; HLA-B*37:01;
YEEDRETF

SEQ ID NO: 105914 - protein, 10 aa, Homo sapiens
  misc_feature (1)..(10): Table A2; Target 3072; AFP; ENSG00000081051; HLA-A*01:01;
YGIASILDSY

SEQ ID NO: 105915 - protein, 10 aa, Homo sapiens
  misc_feature (1)..(10): Table A2; Target 3073; AFP; ENSG00000081051; HLA-A*26:01;
YGIASILDSY

SEQ ID NO: 105916 - protein, 10 aa, Homo sapiens
  misc_feature (1)..(10): Table A2; Target 3074; AFP; ENSG00000081051; HLA-A*29:02;
YGIASILDSY

SEQ ID NO: 105917 - protein, 10 aa, Homo sapiens
  misc_feature (1)..(10): Table A2; Target 3075; AFP; ENSG00000081051; HLA-A*30:02;
YGIASILDSY

SEQ ID NO: 105918 - protein, 10 aa, Homo sapiens
  misc_feature (1)..(10): Table A2; Target 3076; AFP; ENSG00000081051; HLA-B*15:01;
YGIASILDSY

SEQ ID NO: 105919 - protein, 10 aa, Homo sapiens
  misc_feature (1)..(10): Table A2; Target 3077; AFP; ENSG00000081051; HLA-B*27:02;
YGIASILDSY

SEQ ID NO: 105920 - protein, 10 aa, Homo sapiens
  misc_feature (1)..(10): Table A2; Target 3078; AFP; ENSG00000081051; HLA-B*35:01;
YGIASILDSY

SEQ ID NO: 105921 - protein, 10 aa, Homo sapiens
  misc_feature (1)..(10): Table A2; Target 3079; AFP; ENSG00000081051; HLA-B*46:01;
YGIASILDSY

SEQ ID NO: 105922 - protein, 10 aa, Homo sapiens
  misc_feature (1)..(10): Table A2; Target 3080; AFP; ENSG00000081051; HLA-C*02:02;
YGIASILDSY

SEQ ID NO: 105923 - protein, 10 aa, Homo sapiens
  misc_feature (1)..(10): Table A2; Target 3081; AFP; ENSG00000081051; HLA-C*16:04;
YGIASILDSY

SEQ ID NO: 105924 - protein, 9 aa, Homo sapiens
  misc_feature (1)..(9): Table A2; Target 3082; AFP; ENSG00000081051; HLA-B*35:03;
YICSQQDTL

SEQ ID NO: 105925 - protein, 9 aa, Homo sapiens
  misc_feature (1)..(9): Table A2; Target 3083; AFP; ENSG00000081051; HLA-B*38:01;
YICSQQDTL

SEQ ID NO: 105926 - protein, 9 aa, Homo sapiens
  misc_feature (1)..(9): Table A2; Target 3084; AFP; ENSG00000081051; HLA-B*39:01;
YICSQQDTL

SEQ ID NO: 105927 - protein, 9 aa, Homo sapiens
  misc_feature (1)..(9): Table A2; Target 3085; AFP; ENSG00000081051; HLA-B*40:01;
YICSQQDTL

SEQ ID NO: 105928 - protein, 9 aa, Homo sapiens
  misc_feature (1)..(9): Table A2; Target 3086; AFP; ENSG00000081051; HLA-C*02:02;
YICSQQDTL

SEQ ID NO: 105929 - protein, 9 aa, Homo sapiens
  misc_feature (1)..(9): Table A2; Target 3087; AFP; ENSG00000081051; HLA-C*03:03;
YICSQQDTL

SEQ ID NO: 105930 - protein, 9 aa, Homo sapiens
  misc_feature (1)..(9): Table A2; Target 3088; AFP; ENSG00000081051; HLA-C*03:04;
YICSQQDTL

SEQ ID NO: 105931 - protein, 9 aa, Homo sapiens
  misc_feature (1)..(9): Table A2; Target 3089; AFP; ENSG00000081051; HLA-C*07:04;
YICSQQDTL

SEQ ID NO: 105932 - protein, 11 aa, Homo sapiens
  misc_feature (1)..(11): Table A2; Target 3090; AFP; ENSG00000081051; HLA-A*03:02;
YIQESQALAKR

SEQ ID NO: 105933 - protein, 11 aa, Homo sapiens
  misc_feature (1)..(11): Table A2; Target 3091; AFP; ENSG00000081051; HLA-A*11:01;
YIQESQALAKR

SEQ ID NO: 105934 - protein, 11 aa, Homo sapiens
  misc_feature (1)..(11): Table A2; Target 3092; AFP; ENSG00000081051; HLA-A*31:01;
YIQESQALAKR

SEQ ID NO: 105935 - protein, 11 aa, Homo sapiens
  misc_feature (1)..(11): Table A2; Target 3093; AFP; ENSG00000081051; HLA-A*33:01;
YIQESQALAKR

SEQ ID NO: 105936 - protein, 11 aa, Homo sapiens
  misc_feature (1)..(11): Table A2; Target 3094; AFP; ENSG00000081051; HLA-A*33:03;
YIQESQALAKR

SEQ ID NO: 105937 - protein, 11 aa, Homo sapiens
  misc_feature (1)..(11): Table A2; Target 3095; AFP; ENSG00000081051; HLA-A*68:01;
YIQESQALAKR

SEQ ID NO: 105938 - protein, 11 aa, Homo sapiens
  misc_feature (1)..(11): Table A2; Target 3096; AFP; ENSG00000081051; HLA-B*27:02;
YIQESQALAKR

SEQ ID NO: 105939 - protein, 11 aa, Homo sapiens
  misc_feature (1)..(11): Table A2; Target 3097; AFP; ENSG00000081051; HLA-C*07:06;
YIQESQALAKR

SEQ ID NO: 105940 - protein, 10 aa, Homo sapiens
  misc_feature (1)..(10): Table A2; Target 3098; AFP; ENSG00000081051; HLA-A*01:01;
YIQESQALAK

SEQ ID NO: 105941 - protein, 10 aa, Homo sapiens
  misc_feature (1)..(10): Table A2; Target 3099; AFP; ENSG00000081051; HLA-A*03:01;
YIQESQALAK

SEQ ID NO: 105942 - protein, 10 aa, Homo sapiens
  misc_feature (1)..(10): Table A2; Target 3100; AFP; ENSG00000081051; HLA-A*03:02;
YIQESQALAK

SEQ ID NO: 105943 - protein, 10 aa, Homo sapiens
  misc_feature (1)..(10): Table A2; Target 3101; AFP; ENSG00000081051; HLA-A*11:01;
YIQESQALAK

SEQ ID NO: 105944 - protein, 10 aa, Homo sapiens
  misc_feature (1)..(10): Table A2; Target 3102; AFP; ENSG00000081051; HLA-A*68:01;
YIQESQALAK

SEQ ID NO: 105945 - protein, 10 aa, Homo sapiens
  misc_feature (1)..(10): Table A2; Target 3103; AFP; ENSG00000081051; HLA-B*27:02;
YIQESQALAK

SEQ ID NO: 105946 - protein, 10 aa, Homo sapiens
  misc_feature (1)..(10): Table A2; Target 3104; AFP; ENSG00000081051; HLA-C*07:06;
YIQESQALAK

SEQ ID NO: 105947 - protein, 9 aa, Homo sapiens
  misc_feature (1)..(9): Table A2; Target 3105; AFP; ENSG00000081051; HLA-A*02:01;
YIQESQALA

SEQ ID NO: 105948 - protein, 8 aa, Homo sapiens
  misc_feature (1)..(8): Table A2; Target 3106; AFP; ENSG00000081051; HLA-A*30:01;
YIQESQAL

SEQ ID NO: 105949 - protein, 8 aa, Homo sapiens
  misc_feature (1)..(8): Table A2; Target 3107; AFP; ENSG00000081051; HLA-B*08:01;
YIQESQAL

SEQ ID NO: 105950 - protein, 8 aa, Homo sapiens
  misc_feature (1)..(8): Table A2; Target 3108; AFP; ENSG00000081051; HLA-B*15:01;
YIQESQAL

SEQ ID NO: 105951 - protein, 8 aa, Homo sapiens
  misc_feature (1)..(8): Table A2; Target 3109; AFP; ENSG00000081051; HLA-B*27:05;
YIQESQAL

SEQ ID NO: 105952 - protein, 8 aa, Homo sapiens
  misc_feature (1)..(8): Table A2; Target 3110; AFP; ENSG00000081051; HLA-B*35:03;
YIQESQAL

SEQ ID NO: 105953 - protein, 8 aa, Homo sapiens
  misc_feature (1)..(8): Table A2; Target 3111; AFP; ENSG00000081051; HLA-B*37:01;
YIQESQAL

SEQ ID NO: 105954 - protein, 8 aa, Homo sapiens
  misc_feature (1)..(8): Table A2; Target 3112; AFP; ENSG00000081051; HLA-B*39:01;
YIQESQAL

SEQ ID NO: 105955 - protein, 8 aa, Homo sapiens
  misc_feature (1)..(8): Table A2; Target 3113; AFP; ENSG00000081051; HLA-B*40:01;
YIQESQAL

SEQ ID NO: 105956 - protein, 8 aa, Homo sapiens
  misc_feature (1)..(8): Table A2; Target 3114; AFP; ENSG00000081051; HLA-B*40:02;
YIQESQAL

SEQ ID NO: 105957 - protein, 8 aa, Homo sapiens
  misc_feature (1)..(8): Table A2; Target 3115; AFP; ENSG00000081051; HLA-B*46:01;
YIQESQAL

SEQ ID NO: 105958 - protein, 8 aa, Homo sapiens
  misc_feature (1)..(8): Table A2; Target 3116; AFP; ENSG00000081051; HLA-C*01:02;
YIQESQAL

SEQ ID NO: 105959 - protein, 8 aa, Homo sapiens
  misc_feature (1)..(8): Table A2; Target 3117; AFP; ENSG00000081051; HLA-C*03:03;
YIQESQAL

SEQ ID NO: 105960 - protein, 8 aa, Homo sapiens
  misc_feature (1)..(8): Table A2; Target 3118; AFP; ENSG00000081051; HLA-C*03:04;
YIQESQAL

SEQ ID NO: 105961 - protein, 8 aa, Homo sapiens
  misc_feature (1)..(8): Table A2; Target 3119; AFP; ENSG00000081051; HLA-C*05:01;
YIQESQAL

SEQ ID NO: 105962 - protein, 8 aa, Homo sapiens
  misc_feature (1)..(8): Table A2; Target 3120; AFP; ENSG00000081051; HLA-C*07:04;
YIQESQAL

SEQ ID NO: 105963 - protein, 8 aa, Homo sapiens
  misc_feature (1)..(8): Table A2; Target 3121; AFP; ENSG00000081051; HLA-C*14:02;
YIQESQAL

SEQ ID NO: 105964 - protein, 8 aa, Homo sapiens
  misc_feature (1)..(8): Table A2; Target 3122; AFP; ENSG00000081051; HLA-C*16:01;
YIQESQAL

SEQ ID NO: 105965 - protein, 8 aa, Homo sapiens
  misc_feature (1)..(8): Table A2; Target 3123; AFP; ENSG00000081051; HLA-C*16:02;
YIQESQAL

SEQ ID NO: 105966 - protein, 10 aa, Homo sapiens
  misc_feature (1)..(10): Table A2; Target 3124; AFP; ENSG00000081051; HLA-A*01:01;
YLQNAFLVAY

SEQ ID NO: 105967 - protein, 10 aa, Homo sapiens
  misc_feature (1)..(10): Table A2; Target 3125; AFP; ENSG00000081051; HLA-A*29:02;
YLQNAFLVAY

SEQ ID NO: 105968 - protein, 10 aa, Homo sapiens
  misc_feature (1)..(10): Table A2; Target 3126; AFP; ENSG00000081051; HLA-A*30:02;
YLQNAFLVAY

SEQ ID NO: 105969 - protein, 10 aa, Homo sapiens
  misc_feature (1)..(10): Table A2; Target 3127; AFP; ENSG00000081051; HLA-B*15:01;
YLQNAFLVAY

SEQ ID NO: 105970 - protein, 10 aa, Homo sapiens
  misc_feature (1)..(10): Table A2; Target 3128; AFP; ENSG00000081051; HLA-B*46:01;
YLQNAFLVAY

SEQ ID NO: 105971 - protein, 9 aa, Homo sapiens
  misc_feature (1)..(9): Table A2; Target 3129; AFP; ENSG00000081051; HLA-A*02:01;
YLQNAFLVA

SEQ ID NO: 105972 - protein, 9 aa, Homo sapiens
  misc_feature (1)..(9): Table A2; Target 3130; AFP; ENSG00000081051; HLA-A*02:04;
YLQNAFLVA

SEQ ID NO: 105973 - protein, 9 aa, Homo sapiens
  misc_feature (1)..(9): Table A2; Target 3131; AFP; ENSG00000081051; HLA-B*54:01;
YLQNAFLVA

SEQ ID NO: 105974 - protein, 8 aa, Homo sapiens
  misc_feature (1)..(8): Table A2; Target 3132; AFP; ENSG00000081051; HLA-A*02:04;
YLQNAFLV

SEQ ID NO: 105975 - protein, 8 aa, Homo sapiens
  misc_feature (1)..(8): Table A2; Target 3133; AFP; ENSG00000081051; HLA-B*13:02;
YLQNAFLV

SEQ ID NO: 105976 - protein, 9 aa, Homo sapiens
  misc_feature (1)..(9): Table A2; Target 3134; AFP; ENSG00000081051; HLA-B*13:02;
YQCTAEISL

SEQ ID NO: 105977 - protein, 9 aa, Homo sapiens
  misc_feature (1)..(9): Table A2; Target 3135; AFP; ENSG00000081051; HLA-B*27:05;
YQCTAEISL

SEQ ID NO: 105978 - protein, 9 aa, Homo sapiens
  misc_feature (1)..(9): Table A2; Target 3136; AFP; ENSG00000081051; HLA-B*38:01;
YQCTAEISL

SEQ ID NO: 105979 - protein, 9 aa, Homo sapiens
  misc_feature (1)..(9): Table A2; Target 3137; AFP; ENSG00000081051; HLA-B*39:01;
YQCTAEISL

SEQ ID NO: 105980 - protein, 9 aa, Homo sapiens
  misc_feature (1)..(9): Table A2; Target 3138; AFP; ENSG00000081051; HLA-B*40:01;
YQCTAEISL

SEQ ID NO: 105981 - protein, 9 aa, Homo sapiens
  misc_feature (1)..(9): Table A2; Target 3139; AFP; ENSG00000081051; HLA-C*03:03;
YQCTAEISL

SEQ ID NO: 105982 - protein, 9 aa, Homo sapiens
  misc_feature (1)..(9): Table A2; Target 3140; AFP; ENSG00000081051; HLA-C*07:04;
YQCTAEISL

SEQ ID NO: 105983 - protein, 8 aa, Homo sapiens
  misc_feature (1)..(8): Table A2; Target 3141; AFP; ENSG00000081051; HLA-B*07:02;
YTKKAPQL

SEQ ID NO: 105984 - protein, 8 aa, Homo sapiens
  misc_feature (1)..(8): Table A2; Target 3142; AFP; ENSG00000081051; HLA-B*08:01;
YTKKAPQL

SEQ ID NO: 105985 - protein, 8 aa, Homo sapiens
  misc_feature (1)..(8): Table A2; Target 3143; AFP; ENSG00000081051; HLA-B*40:02;
YTKKAPQL

SEQ ID NO: 105986 - protein, 8 aa, Homo sapiens
  misc_feature (1)..(8): Table A2; Target 3144; AFP; ENSG00000081051; HLA-B*51:01;
YTKKAPQL

SEQ ID NO: 105987 - protein, 8 aa, Homo sapiens
  misc_feature (1)..(8): Table A2; Target 3145; AFP; ENSG00000081051; HLA-B*58:01;
YTKKAPQL

SEQ ID NO: 105988 - protein, 8 aa, Homo sapiens
  misc_feature (1)..(8): Table A2; Target 3146; AFP; ENSG00000081051; HLA-C*03:03;
YTKKAPQL

SEQ ID NO: 105989 - protein, 8 aa, Homo sapiens
  misc_feature (1)..(8): Table A2; Target 3147; AFP; ENSG00000081051; HLA-C*03:04;
YTKKAPQL

SEQ ID NO: 105990 - protein, 8 aa, Homo sapiens
  misc_feature (1)..(8): Table A2; Target 3148; AFP; ENSG00000081051; HLA-C*06:02;
YTKKAPQL

SEQ ID NO: 105991 - protein, 8 aa, Homo sapiens
  misc_feature (1)..(8): Table A2; Target 3149; AFP; ENSG00000081051; HLA-C*07:01;
YTKKAPQL

SEQ ID NO: 105992 - protein, 8 aa, Homo sapiens
  misc_feature (1)..(8): Table A2; Target 3150; AFP; ENSG00000081051; HLA-C*12:03;
YTKKAPQL

SEQ ID NO: 105993 - protein, 8 aa, Homo sapiens
  misc_feature (1)..(8): Table A2; Target 3151; AFP; ENSG00000081051; HLA-C*16:01;
YTKKAPQL

SEQ ID NO: 105994 - protein, 8 aa, Homo sapiens
  misc_feature (1)..(8): Table A2; Target 3152; AFP; ENSG00000081051; HLA-C*16:02;
YTKKAPQL

SEQ ID NO: 105995 - protein, 11 aa, Homo sapiens
  misc_feature (1)..(11): Table A2; Target 3153; AFP; ENSG00000081051; HLA-A*29:02;
YYLQNAFLVAY

SEQ ID NO: 105996 - protein, 9 aa, Homo sapiens
  misc_feature (1)..(9): Table A2; Target 3154; AFP; ENSG00000081051; HLA-A*23:01;
YYLQNAFLV

SEQ ID NO: 105997 - protein, 9 aa, Homo sapiens
  misc_feature (1)..(9): Table A2; Target 3155; AFP; ENSG00000081051; HLA-A*24:02;
YYLQNAFLV

SEQ ID NO: 105998 - protein, 9 aa, Homo sapiens
  misc_feature (1)..(9): Table A2; Target 3156; AFP; ENSG00000081051; HLA-A*29:02;
YYLQNAFLV

SEQ ID NO: 105999 - protein, 8 aa, Homo sapiens
  misc_feature (1)..(8): Table A2; Target 3157; AFP; ENSG00000081051; HLA-A*23:01;
YYLQNAFL

SEQ ID NO: 106000 - protein, 9 aa, Homo sapiens
  misc_feature (1)..(9): Table A2; Target 3158; MART1; ENSG00000120215; HLA-A*02:03;
AAGIGILTV

SEQ ID NO: 106001 - protein, 9 aa, Homo sapiens
  misc_feature (1)..(9): Table A2; Target 3159; MART1; ENSG00000120215; HLA-B*13:02;
AAGIGILTV

SEQ ID NO: 106002 - protein, 9 aa, Homo sapiens
  misc_feature (1)..(9): Table A2; Target 3160; MART1; ENSG00000120215; HLA-B*49:01;
AAGIGILTV

SEQ ID NO: 106003 - protein, 9 aa, Homo sapiens
  misc_feature (1)..(9): Table A2; Target 3161; MART1; ENSG00000120215; HLA-B*51:01;
AAGIGILTV

SEQ ID NO: 106004 - protein, 9 aa, Homo sapiens
  misc_feature (1)..(9): Table A2; Target 3162; MART1; ENSG00000120215; HLA-C*12:03;
AAGIGILTV

SEQ ID NO: 106005 - protein, 10 aa, Homo sapiens
  misc_feature (1)..(10): Table A2; Target 3163; MART1; ENSG00000120215; HLA-A*30:01;
AEEAAGIGIL

SEQ ID NO: 106006 - protein, 10 aa, Homo sapiens
  misc_feature (1)..(10): Table A2; Target 3164; MART1; ENSG00000120215; HLA-B*40:01;
AEEAAGIGIL

SEQ ID NO: 106007 - protein, 10 aa, Homo sapiens
  misc_feature (1)..(10): Table A2; Target 3165; MART1; ENSG00000120215; HLA-B*40:02;
AEEAAGIGIL

SEQ ID NO: 106008 - protein, 10 aa, Homo sapiens
  misc_feature (1)..(10): Table A2; Target 3166; MART1; ENSG00000120215; HLA-B*44:02;
AEEAAGIGIL

SEQ ID NO: 106009 - protein, 10 aa, Homo sapiens
  misc_feature (1)..(10): Table A2; Target 3167; MART1; ENSG00000120215; HLA-B*49:01;
AEEAAGIGIL

SEQ ID NO: 106010 - protein, 9 aa, Homo sapiens
  misc_feature (1)..(9): Table A2; Target 3168; MART1; ENSG00000120215; HLA-A*30:01;
AEEAAGIGI

SEQ ID NO: 106011 - protein, 9 aa, Homo sapiens
  misc_feature (1)..(9): Table A2; Target 3169; MART1; ENSG00000120215; HLA-B*40:01;
AEEAAGIGI

SEQ ID NO: 106012 - protein, 9 aa, Homo sapiens
  misc_feature (1)..(9): Table A2; Target 3170; MART1; ENSG00000120215; HLA-B*44:02;
AEEAAGIGI

SEQ ID NO: 106013 - protein, 9 aa, Homo sapiens
  misc_feature (1)..(9): Table A2; Target 3171; MART1; ENSG00000120215; HLA-B*44:03;
AEEAAGIGI

SEQ ID NO: 106014 - protein, 9 aa, Homo sapiens
  misc_feature (1)..(9): Table A2; Target 3172; MART1; ENSG00000120215; HLA-B*49:01;
AEEAAGIGI

SEQ ID NO: 106015 - protein, 10 aa, Homo sapiens
  misc_feature (1)..(10): Table A2; Target 3173; MART1; ENSG00000120215; HLA-B*27:05;
AEQSPPPYSP

SEQ ID NO: 106016 - protein, 10 aa, Homo sapiens
  misc_feature (1)..(10): Table A2; Target 3174; MART1; ENSG00000120215; HLA-B*40:02;
AEQSPPPYSP

SEQ ID NO: 106017 - protein, 10 aa, Homo sapiens
  misc_feature (1)..(10): Table A2; Target 3175; MART1; ENSG00000120215; HLA-B*44:02;
AEQSPPPYSP

SEQ ID NO: 106018 - protein, 8 aa, Homo sapiens
  misc_feature (1)..(8): Table A2; Target 3176; MART1; ENSG00000120215; HLA-A*30:02;
AEQSPPPY

SEQ ID NO: 106019 - protein, 8 aa, Homo sapiens
  misc_feature (1)..(8): Table A2; Target 3177; MART1; ENSG00000120215; HLA-B*18:01;
AEQSPPPY

SEQ ID NO: 106020 - protein, 8 aa, Homo sapiens
  misc_feature (1)..(8): Table A2; Target 3178; MART1; ENSG00000120215; HLA-B*37:01;
AEQSPPPY

SEQ ID NO: 106021 - protein, 8 aa, Homo sapiens
  misc_feature (1)..(8): Table A2; Target 3179; MART1; ENSG00000120215; HLA-B*44:03;
AEQSPPPY

SEQ ID NO: 106022 - protein, 9 aa, Homo sapiens
  misc_feature (1)..(9): Table A2; Target 3180; MART1; ENSG00000120215; HLA-A*23:01;
AGIGILTVI

SEQ ID NO: 106023 - protein, 9 aa, Homo sapiens
  misc_feature (1)..(9): Table A2; Target 3181; MART1; ENSG00000120215; HLA-B*13:02;
AGIGILTVI

SEQ ID NO: 106024 - protein, 9 aa, Homo sapiens
  misc_feature (1)..(9): Table A2; Target 3182; MART1; ENSG00000120215; HLA-B*49:01;
AGIGILTVI

SEQ ID NO: 106025 - protein, 9 aa, Homo sapiens
  misc_feature (1)..(9): Table A2; Target 3183; MART1; ENSG00000120215; HLA-C*02:02;
AGIGILTVI

SEQ ID NO: 106026 - protein, 10 aa, Homo sapiens
  misc_feature (1)..(10): Table A2; Target 3184; MART1; ENSG00000120215; HLA-A*02:01;
ALMDKSLHVG

SEQ ID NO: 106027 - protein, 9 aa, Homo sapiens
  misc_feature (1)..(9): Table A2; Target 3185; MART1; ENSG00000120215; HLA-A*02:01;
ALMDKSLHV

SEQ ID NO: 106028 - protein, 9 aa, Homo sapiens
  misc_feature (1)..(9): Table A2; Target 3186; MART1; ENSG00000120215; HLA-A*02:03;
ALMDKSLHV

SEQ ID NO: 106029 - protein, 9 aa, Homo sapiens
  misc_feature (1)..(9): Table A2; Target 3187; MART1; ENSG00000120215; HLA-A*02:04;
ALMDKSLHV

SEQ ID NO: 106030 - protein, 9 aa, Homo sapiens
  misc_feature (1)..(9): Table A2; Target 3188; MART1; ENSG00000120215; HLA-A*02:07;
ALMDKSLHV

SEQ ID NO: 106031 - protein, 9 aa, Homo sapiens
  misc_feature (1)..(9): Table A2; Target 3189; MART1; ENSG00000120215; HLA-B*08:01;
ALMDKSLHV

SEQ ID NO: 106032 - protein, 9 aa, Homo sapiens
  misc_feature (1)..(9): Table A2; Target 3190; MART1; ENSG00000120215; HLA-B*13:02;
ALMDKSLHV

SEQ ID NO: 106033 - protein, 9 aa, Homo sapiens
  misc_feature (1)..(9): Table A2; Target 3191; MART1; ENSG00000120215; HLA-B*55:01;
ALMDKSLHV

SEQ ID NO: 106034 - protein, 10 aa, Homo sapiens
  misc_feature (1)..(10): Table A2; Target 3192; MART1; ENSG00000120215; HLA-B*54:01;
APPAYEKLSA

SEQ ID NO: 106035 - protein, 10 aa, Homo sapiens
  misc_feature (1)..(10): Table A2; Target 3193; MART1; ENSG00000120215; HLA-B*56:01;
APPAYEKLSA

SEQ ID NO: 106036 - protein, 9 aa, Homo sapiens
  misc_feature (1)..(9): Table A2; Target 3194; MART1; ENSG00000120215; HLA-A*33:03;
CPQEGFDHR

SEQ ID NO: 106037 - protein, 10 aa, Homo sapiens
  misc_feature (1)..(10): Table A2; Target 3195; MART1; ENSG00000120215; HLA-A*33:01;
DAHFIYGYPK

SEQ ID NO: 106038 - protein, 8 aa, Homo sapiens
  misc_feature (1)..(8): Table A2; Target 3196; MART1; ENSG00000120215; HLA-B*18:01;
DAHFIYGY

SEQ ID NO: 106039 - protein, 8 aa, Homo sapiens
  misc_feature (1)..(8): Table A2; Target 3197; MART1; ENSG00000120215; HLA-B*35:01;
DAHFIYGY

SEQ ID NO: 106040 - protein, 8 aa, Homo sapiens
  misc_feature (1)..(8): Table A2; Target 3198; MART1; ENSG00000120215; HLA-B*51:01;
DAHFIYGY

SEQ ID NO: 106041 - protein, 9 aa, Homo sapiens
  misc_feature (1)..(9): Table A2; Target 3199; MART1; ENSG00000120215; HLA-B*08:01;
DHRDSKVSL

SEQ ID NO: 106042 - protein, 9 aa, Homo sapiens
  misc_feature (1)..(9): Table A2; Target 3200; MART1; ENSG00000120215; HLA-B*38:01;
DHRDSKVSL

SEQ ID NO: 106043 - protein, 9 aa, Homo sapiens
  misc_feature (1)..(9): Table A2; Target 3201; MART1; ENSG00000120215; HLA-B*39:01;
DHRDSKVSL

SEQ ID NO: 106044 - protein, 9 aa, Homo sapiens
  misc_feature (1)..(9): Table A2; Target 3202; MART1; ENSG00000120215; HLA-A*33:01;
DSKVSLQEK

SEQ ID NO: 106045 - protein, 9 aa, Homo sapiens
  misc_feature (1)..(9): Table A2; Target 3203; MART1; ENSG00000120215; HLA-A*33:03;
DSKVSLQEK

SEQ ID NO: 106046 - protein, 9 aa, Homo sapiens
  misc_feature (1)..(9): Table A2; Target 3204; MART1; ENSG00000120215; HLA-A*68:01;
DSKVSLQEK

SEQ ID NO: 106047 - protein, 9 aa, Homo sapiens
  misc_feature (1)..(9): Table A2; Target 3205; MART1; ENSG00000120215; HLA-C*07:06;
DSKVSLQEK

SEQ ID NO: 106048 - protein, 11 aa, Homo sapiens
  misc_feature (1)..(11): Table A2; Target 3206; MART1; ENSG00000120215; HLA-A*25:01;
EAAGIGILTVI

SEQ ID NO: 106049 - protein, 11 aa, Homo sapiens
  misc_feature (1)..(11): Table A2; Target 3207; MART1; ENSG00000120215; HLA-A*26:01;
EAAGIGILTVI

SEQ ID NO: 106050 - protein, 11 aa, Homo sapiens
  misc_feature (1)..(11): Table A2; Target 3208; MART1; ENSG00000120215; HLA-A*68:01;
EAAGIGILTVI

SEQ ID NO: 106051 - protein, 11 aa, Homo sapiens
  misc_feature (1)..(11): Table A2; Target 3209; MART1; ENSG00000120215; HLA-A*68:02;
EAAGIGILTVI

SEQ ID NO: 106052 - protein, 10 aa, Homo sapiens
  misc_feature (1)..(10): Table A2; Target 3210; MART1; ENSG00000120215; HLA-A*25:01;
EAAGIGILTV

SEQ ID NO: 106053 - protein, 10 aa, Homo sapiens
  misc_feature (1)..(10): Table A2; Target 3211; MART1; ENSG00000120215; HLA-A*26:01;
EAAGIGILTV

SEQ ID NO: 106054 - protein, 10 aa, Homo sapiens
  misc_feature (1)..(10): Table A2; Target 3212; MART1; ENSG00000120215; HLA-A*68:01;
EAAGIGILTV

SEQ ID NO: 106055 - protein, 10 aa, Homo sapiens
  misc_feature (1)..(10): Table A2; Target 3213; MART1; ENSG00000120215; HLA-A*68:02;
EAAGIGILTV

SEQ ID NO: 106056 - protein, 10 aa, Homo sapiens
  misc_feature (1)..(10): Table A2; Target 3214; MART1; ENSG00000120215; HLA-B*51:01;
EAAGIGILTV

SEQ ID NO: 106057 - protein, 10 aa, Homo sapiens
  misc_feature (1)..(10): Table A2; Target 3215; MART1; ENSG00000120215; HLA-B*54:01;
EAAGIGILTV

SEQ ID NO: 106058 - protein, 10 aa, Homo sapiens
  misc_feature (1)..(10): Table A2; Target 3216; MART1; ENSG00000120215; HLA-C*07:06;
EAAGIGILTV

SEQ ID NO: 106059 - protein, 9 aa, Homo sapiens
  misc_feature (1)..(9): Table A2; Target 3217; MART1; ENSG00000120215; HLA-A*33:03;
EAAGIGILT

SEQ ID NO: 106060 - protein, 9 aa, Homo sapiens
  misc_feature (1)..(9): Table A2; Target 3218; MART1; ENSG00000120215; HLA-A*68:01;
EAAGIGILT

SEQ ID NO: 106061 - protein, 9 aa, Homo sapiens
  misc_feature (1)..(9): Table A2; Target 3219; MART1; ENSG00000120215; HLA-A*68:02;
EAAGIGILT

SEQ ID NO: 106062 - protein, 9 aa, Homo sapiens
  misc_feature (1)..(9): Table A2; Target 3220; MART1; ENSG00000120215; HLA-C*07:06;
EAAGIGILT

SEQ ID NO: 106063 - protein, 9 aa, Homo sapiens
  misc_feature (1)..(9): Table A2; Target 3221; MART1; ENSG00000120215; HLA-A*26:01;
EDAHFIYGY

SEQ ID NO: 106064 - protein, 11 aa, Homo sapiens
  misc_feature (1)..(11): Table A2; Target 3222; MART1; ENSG00000120215; HLA-A*30:01;
EEAAGIGILTV

SEQ ID NO: 106065 - protein, 11 aa, Homo sapiens
  misc_feature (1)..(11): Table A2; Target 3223; MART1; ENSG00000120215; HLA-A*68:02;
EEAAGIGILTV

SEQ ID NO: 106066 - protein, 11 aa, Homo sapiens
  misc_feature (1)..(11): Table A2; Target 3224; MART1; ENSG00000120215; HLA-B*44:02;
EEAAGIGILTV

SEQ ID NO: 106067 - protein, 11 aa, Homo sapiens
  misc_feature (1)..(11): Table A2; Target 3225; MART1; ENSG00000120215; HLA-B*44:03;
EEAAGIGILTV

SEQ ID NO: 106068 - protein, 11 aa, Homo sapiens
  misc_feature (1)..(11): Table A2; Target 3226; MART1; ENSG00000120215; HLA-B*49:01;
EEAAGIGILTV

SEQ ID NO: 106069 - protein, 9 aa, Homo sapiens
  misc_feature (1)..(9): Table A2; Target 3227; MART1; ENSG00000120215; HLA-A*30:01;
EEAAGIGIL

SEQ ID NO: 106070 - protein, 9 aa, Homo sapiens
  misc_feature (1)..(9): Table A2; Target 3228; MART1; ENSG00000120215; HLA-B*38:01;
EEAAGIGIL

SEQ ID NO: 106071 - protein, 9 aa, Homo sapiens
  misc_feature (1)..(9): Table A2; Target 3229; MART1; ENSG00000120215; HLA-B*40:01;
EEAAGIGIL

SEQ ID NO: 106072 - protein, 9 aa, Homo sapiens
  misc_feature (1)..(9): Table A2; Target 3230; MART1; ENSG00000120215; HLA-B*44:02;
EEAAGIGIL

SEQ ID NO: 106073 - protein, 9 aa, Homo sapiens
  misc_feature (1)..(9): Table A2; Target 3231; MART1; ENSG00000120215; HLA-B*44:03;
EEAAGIGIL

SEQ ID NO: 106074 - protein, 8 aa, Homo sapiens
  misc_feature (1)..(8): Table A2; Target 3232; MART1; ENSG00000120215; HLA-B*44:02;
EEAAGIGI

SEQ ID NO: 106075 - protein, 8 aa, Homo sapiens
  misc_feature (1)..(8): Table A2; Target 3233; MART1; ENSG00000120215; HLA-B*44:03;
EEAAGIGI

SEQ ID NO: 106076 - protein, 8 aa, Homo sapiens
  misc_feature (1)..(8): Table A2; Target 3234; MART1; ENSG00000120215; HLA-B*49:01;
EEAAGIGI

SEQ ID NO: 106077 - protein, 11 aa, Homo sapiens
  misc_feature (1)..(11): Table A2; Target 3235; MART1; ENSG00000120215; HLA-A*01:01;
EPVVPNAPPAY

SEQ ID NO: 106078 - protein, 11 aa, Homo sapiens
  misc_feature (1)..(11): Table A2; Target 3236; MART1; ENSG00000120215; HLA-A*26:01;
EPVVPNAPPAY

SEQ ID NO: 106079 - protein, 11 aa, Homo sapiens
  misc_feature (1)..(11): Table A2; Target 3237; MART1; ENSG00000120215; HLA-A*30:02;
EPVVPNAPPAY

SEQ ID NO: 106080 - protein, 11 aa, Homo sapiens
  misc_feature (1)..(11): Table A2; Target 3238; MART1; ENSG00000120215; HLA-B*35:01;
EPVVPNAPPAY

SEQ ID NO: 106081 - protein, 10 aa, Homo sapiens
  misc_feature (1)..(10): Table A2; Target 3239; MART1; ENSG00000120215; HLA-B*54:01;
EPVVPNAPPA

SEQ ID NO: 106082 - protein, 9 aa, Homo sapiens
  misc_feature (1)..(9): Table A2; Target 3240; MART1; ENSG00000120215; HLA-B*13:02;
EQSPPPYSP

SEQ ID NO: 106083 - protein, 9 aa, Homo sapiens
  misc_feature (1)..(9): Table A2; Target 3241; MART1; ENSG00000120215; HLA-B*27:05;
EQSPPPYSP

SEQ ID NO: 106084 - protein, 9 aa, Homo sapiens
  misc_feature (1)..(9): Table A2; Target 3242; MART1; ENSG00000120215; HLA-B*38:01;
EQSPPPYSP

SEQ ID NO: 106085 - protein, 9 aa, Homo sapiens
  misc_feature (1)..(9): Table A2; Target 3243; MART1; ENSG00000120215; HLA-B*39:01;
EQSPPPYSP

SEQ ID NO: 106086 - protein, 9 aa, Homo sapiens
  misc_feature (1)..(9): Table A2; Target 3244; MART1; ENSG00000120215; HLA-B*40:02;
EQSPPPYSP

SEQ ID NO: 106087 - protein, 9 aa, Homo sapiens
  misc_feature (1)..(9): Table A2; Target 3245; MART1; ENSG00000120215; HLA-C*06:02;
EQSPPPYSP

SEQ ID NO: 106088 - protein, 9 aa, Homo sapiens
  misc_feature (1)..(9): Table A2; Target 3246; MART1; ENSG00000120215; HLA-A*02:01;
GILTVILGV

SEQ ID NO: 106089 - protein, 9 aa, Homo sapiens
  misc_feature (1)..(9): Table A2; Target 3247; MART1; ENSG00000120215; HLA-A*02:03;
GILTVILGV

SEQ ID NO: 106090 - protein, 9 aa, Homo sapiens
  misc_feature (1)..(9): Table A2; Target 3248; MART1; ENSG00000120215; HLA-A*02:04;
GILTVILGV

SEQ ID NO: 106091 - protein, 9 aa, Homo sapiens
  misc_feature (1)..(9): Table A2; Target 3249; MART1; ENSG00000120215; HLA-A*02:07;
GILTVILGV

SEQ ID NO: 106092 - protein, 9 aa, Homo sapiens
  misc_feature (1)..(9): Table A2; Target 3250; MART1; ENSG00000120215; HLA-B*13:02;
GILTVILGV

SEQ ID NO: 106093 - protein, 9 aa, Homo sapiens
  misc_feature (1)..(9): Table A2; Target 3251; MART1; ENSG00000120215; HLA-A*31:01;
GTQCALTRR

SEQ ID NO: 106094 - protein, 9 aa, Homo sapiens
  misc_feature (1)..(9): Table A2; Target 3252; MART1; ENSG00000120215; HLA-B*54:01;
HSYTTAEEA

SEQ ID NO: 106095 - protein, 10 aa, Homo sapiens
  misc_feature (1)..(10): Table A2; Target 3253; MART1; ENSG00000120215; HLA-A*68:01;
HVGTQCALTR

SEQ ID NO: 106096 - protein, 10 aa, Homo sapiens
  misc_feature (1)..(10): Table A2; Target 3254; MART1; ENSG00000120215; HLA-C*07:06;
HVGTQCALTR

SEQ ID NO: 106097 - protein, 8 aa, Homo sapiens
  misc_feature (1)..(8): Table A2; Target 3255; MART1; ENSG00000120215; HLA-B*08:01;
HVGTQCAL

SEQ ID NO: 106098 - protein, 8 aa, Homo sapiens
  misc_feature (1)..(8): Table A2; Target 3256; MART1; ENSG00000120215; HLA-C*01:02;
HVGTQCAL

SEQ ID NO: 106099 - protein, 8 aa, Homo sapiens
  misc_feature (1)..(8): Table A2; Target 3257; MART1; ENSG00000120215; HLA-C*07:04;
HVGTQCAL

SEQ ID NO: 106100 - protein, 8 aa, Homo sapiens
  misc_feature (1)..(8): Table A2; Target 3258; MART1; ENSG00000120215; HLA-B*13:02;
ILTVILGV

SEQ ID NO: 106101 - protein, 11 aa, Homo sapiens
  misc_feature (1)..(11): Table A2; Target 3259; MART1; ENSG00000120215; HLA-A*03:02;
KLSAEQSPPPY

SEQ ID NO: 106102 - protein, 11 aa, Homo sapiens
  misc_feature (1)..(11): Table A2; Target 3260; MART1; ENSG00000120215; HLA-A*30:02;
KLSAEQSPPPY

SEQ ID NO: 106103 - protein, 9 aa, Homo sapiens
  misc_feature (1)..(9): Table A2; Target 3261; MART1; ENSG00000120215; HLA-B*58:01;
KSLHVGTQC

SEQ ID NO: 106104 - protein, 9 aa, Homo sapiens
  misc_feature (1)..(9): Table A2; Target 3262; MART1; ENSG00000120215; HLA-B*38:01;
LHVGTQCAL

SEQ ID NO: 106105 - protein, 9 aa, Homo sapiens
  misc_feature (1)..(9): Table A2; Target 3263; MART1; ENSG00000120215; HLA-B*39:01;
LHVGTQCAL

SEQ ID NO: 106106 - protein, 10 aa, Homo sapiens
  misc_feature (1)..(10): Table A2; Target 3264; MART1; ENSG00000120215; HLA-A*01:01;
LSAEQSPPPY

SEQ ID NO: 106107 - protein, 10 aa, Homo sapiens
  misc_feature (1)..(10): Table A2; Target 3265; MART1; ENSG00000120215; HLA-A*26:01;
LSAEQSPPPY

SEQ ID NO: 106108 - protein, 10 aa, Homo sapiens
  misc_feature (1)..(10): Table A2; Target 3266; MART1; ENSG00000120215; HLA-A*30:02;
LSAEQSPPPY

SEQ ID NO: 106109 - protein, 10 aa, Homo sapiens
  misc_feature (1)..(10): Table A2; Target 3267; MART1; ENSG00000120215; HLA-B*35:01;
MPREDAHFIY

SEQ ID NO: 106110 - protein, 9 aa, Homo sapiens
  misc_feature (1)..(9): Table A2; Target 3268; MART1; ENSG00000120215; HLA-B*51:01;
MPREDAHFI

SEQ ID NO: 106111 - protein, 9 aa, Homo sapiens
  misc_feature (1)..(9): Table A2; Target 3269; MART1; ENSG00000120215; HLA-A*02:07;
NAPPAYEKL

SEQ ID NO: 106112 - protein, 9 aa, Homo sapiens
  misc_feature (1)..(9): Table A2; Target 3270; MART1; ENSG00000120215; HLA-B*35:03;
NAPPAYEKL

SEQ ID NO: 106113 - protein, 9 aa, Homo sapiens
  misc_feature (1)..(9): Table A2; Target 3271; MART1; ENSG00000120215; HLA-B*51:01;
NAPPAYEKL

SEQ ID NO: 106114 - protein, 9 aa, Homo sapiens
  misc_feature (1)..(9): Table A2; Target 3272; MART1; ENSG00000120215; HLA-C*01:02;
NAPPAYEKL

SEQ ID NO: 106115 - protein, 9 aa, Homo sapiens
  misc_feature (1)..(9): Table A2; Target 3273; MART1; ENSG00000120215; HLA-C*05:01;
NAPPAYEKL

SEQ ID NO: 106116 - protein, 10 aa, Homo sapiens
  misc_feature (1)..(10): Table A2; Target 3274; MART1; ENSG00000120215; HLA-A*26:01;
PVVPNAPPAY

SEQ ID NO: 106117 - protein, 10 aa, Homo sapiens
  misc_feature (1)..(10): Table A2; Target 3275; MART1; ENSG00000120215; HLA-A*30:02;
PVVPNAPPAY

SEQ ID NO: 106118 - protein, 9 aa, Homo sapiens
  misc_feature (1)..(9): Table A2; Target 3276; MART1; ENSG00000120215; HLA-B*40:02;
QEKNCEPVV

SEQ ID NO: 106119 - protein, 9 aa, Homo sapiens
  misc_feature (1)..(9): Table A2; Target 3277; MART1; ENSG00000120215; HLA-B*49:01;
QEKNCEPVV

SEQ ID NO: 106120 - protein, 10 aa, Homo sapiens
  misc_feature (1)..(10): Table A2; Target 3278; MART1; ENSG00000120215; HLA-B*44:02;
REDAHFIYGY

SEQ ID NO: 106121 - protein, 9 aa, Homo sapiens
  misc_feature (1)..(9): Table A2; Target 3279; MART1; ENSG00000120215; HLA-A*01:01;
SAEQSPPPY

SEQ ID NO: 106122 - protein, 9 aa, Homo sapiens
  misc_feature (1)..(9): Table A2; Target 3280; MART1; ENSG00000120215; HLA-A*30:02;
SAEQSPPPY

SEQ ID NO: 106123 - protein, 9 aa, Homo sapiens
  misc_feature (1)..(9): Table A2; Target 3281; MART1; ENSG00000120215; HLA-A*32:01;
SAEQSPPPY

SEQ ID NO: 106124 - protein, 9 aa, Homo sapiens
  misc_feature (1)..(9): Table A2; Target 3282; MART1; ENSG00000120215; HLA-B*15:03;
SAEQSPPPY

SEQ ID NO: 106125 - protein, 9 aa, Homo sapiens
  misc_feature (1)..(9): Table A2; Target 3283; MART1; ENSG00000120215; HLA-B*35:01;
SAEQSPPPY

SEQ ID NO: 106126 - protein, 9 aa, Homo sapiens
  misc_feature (1)..(9): Table A2; Target 3284; MART1; ENSG00000120215; HLA-B*35:03;
SAEQSPPPY

SEQ ID NO: 106127 - protein, 9 aa, Homo sapiens
  misc_feature (1)..(9): Table A2; Target 3285; MART1; ENSG00000120215; HLA-B*39:01;
SAEQSPPPY

SEQ ID NO: 106128 - protein, 9 aa, Homo sapiens
  misc_feature (1)..(9): Table A2; Target 3286; MART1; ENSG00000120215; HLA-B*46:01;
SAEQSPPPY

SEQ ID NO: 106129 - protein, 9 aa, Homo sapiens
  misc_feature (1)..(9): Table A2; Target 3287; MART1; ENSG00000120215; HLA-B*55:01;
SAEQSPPPY

SEQ ID NO: 106130 - protein, 9 aa, Homo sapiens
  misc_feature (1)..(9): Table A2; Target 3288; MART1; ENSG00000120215; HLA-B*58:01;
SAEQSPPPY

SEQ ID NO: 106131 - protein, 9 aa, Homo sapiens
  misc_feature (1)..(9): Table A2; Target 3289; MART1; ENSG00000120215; HLA-C*01:02;
SAEQSPPPY

SEQ ID NO: 106132 - protein, 9 aa, Homo sapiens
  misc_feature (1)..(9): Table A2; Target 3290; MART1; ENSG00000120215; HLA-C*02:02;
SAEQSPPPY

SEQ ID NO: 106133 - protein, 9 aa, Homo sapiens
  misc_feature (1)..(9): Table A2; Target 3291; MART1; ENSG00000120215; HLA-C*03:03;
SAEQSPPPY

SEQ ID NO: 106134 - protein, 9 aa, Homo sapiens
  misc_feature (1)..(9): Table A2; Target 3292; MART1; ENSG00000120215; HLA-C*03:04;
SAEQSPPPY

SEQ ID NO: 106135 - protein, 9 aa, Homo sapiens
  misc_feature (1)..(9): Table A2; Target 3293; MART1; ENSG00000120215; HLA-C*04:01;
SAEQSPPPY

SEQ ID NO: 106136 - protein, 9 aa, Homo sapiens
  misc_feature (1)..(9): Table A2; Target 3294; MART1; ENSG00000120215; HLA-C*05:01;
SAEQSPPPY

SEQ ID NO: 106137 - protein, 9 aa, Homo sapiens
  misc_feature (1)..(9): Table A2; Target 3295; MART1; ENSG00000120215; HLA-C*07:04;
SAEQSPPPY

SEQ ID NO: 106138 - protein, 9 aa, Homo sapiens
  misc_feature (1)..(9): Table A2; Target 3296; MART1; ENSG00000120215; HLA-C*07:06;
SAEQSPPPY

SEQ ID NO: 106139 - protein, 9 aa, Homo sapiens
  misc_feature (1)..(9): Table A2; Target 3297; MART1; ENSG00000120215; HLA-C*12:03;
SAEQSPPPY

SEQ ID NO: 106140 - protein, 9 aa, Homo sapiens
  misc_feature (1)..(9): Table A2; Target 3298; MART1; ENSG00000120215; HLA-C*16:02;
SAEQSPPPY

SEQ ID NO: 106141 - protein, 9 aa, Homo sapiens
  misc_feature (1)..(9): Table A2; Target 3299; MART1; ENSG00000120215; HLA-C*14:02;
SYTTAEEAA

SEQ ID NO: 106142 - protein, 8 aa, Homo sapiens
  misc_feature (1)..(8): Table A2; Target 3300; MART1; ENSG00000120215; HLA-C*14:02;
SYTTAEEA

SEQ ID NO: 106143 - protein, 11 aa, Homo sapiens
  misc_feature (1)..(11): Table A2; Target 3301; MART1; ENSG00000120215; HLA-B*35:03;
TAEEAAGIGIL

SEQ ID NO: 106144 - protein, 11 aa, Homo sapiens
  misc_feature (1)..(11): Table A2; Target 3302; MART1; ENSG00000120215; HLA-C*05:01;
TAEEAAGIGIL

SEQ ID NO: 106145 - protein, 10 aa, Homo sapiens
  misc_feature (1)..(10): Table A2; Target 3303; MART1; ENSG00000120215; HLA-C*05:01;
TAEEAAGIGI

SEQ ID NO: 106146 - protein, 8 aa, Homo sapiens
  misc_feature (1)..(8): Table A2; Target 3304; MART1; ENSG00000120215; HLA-C*05:01;
TAEEAAGI

SEQ ID NO: 106147 - protein, 11 aa, Homo sapiens
  misc_feature (1)..(11): Table A2; Target 3305; MART1; ENSG00000120215; HLA-A*26:01;
TTAEEAAGIGI

SEQ ID NO: 106148 - protein, 11 aa, Homo sapiens
  misc_feature (1)..(11): Table A2; Target 3306; MART1; ENSG00000120215; HLA-A*68:01;
TTAEEAAGIGI

SEQ ID NO: 106149 - protein, 11 aa, Homo sapiens
  misc_feature (1)..(11): Table A2; Target 3307; MART1; ENSG00000120215; HLA-A*68:02;
TTAEEAAGIGI

SEQ ID NO: 106150 - protein, 9 aa, Homo sapiens
  misc_feature (1)..(9): Table A2; Target 3308; MART1; ENSG00000120215; HLA-A*02:04;
VILGVLLLI

SEQ ID NO: 106151 - protein, 9 aa, Homo sapiens
  misc_feature (1)..(9): Table A2; Target 3309; MART1; ENSG00000120215; HLA-A*23:01;
VILGVLLLI

SEQ ID NO: 106152 - protein, 11 aa, Homo sapiens
  misc_feature (1)..(11): Table A2; Target 3310; MART1; ENSG00000120215; HLA-B*07:02;
VPNAPPAYEKL

SEQ ID NO: 106153 - protein, 11 aa, Homo sapiens
  misc_feature (1)..(11): Table A2; Target 3311; MART1; ENSG00000120215; HLA-B*35:03;
VPNAPPAYEKL

SEQ ID NO: 106154 - protein, 10 aa, Homo sapiens
  misc_feature (1)..(10): Table A2; Target 3312; MART1; ENSG00000120215; HLA-C*07:06;
VPNAPPAYEK

SEQ ID NO: 106155 - protein, 8 aa, Homo sapiens
  misc_feature (1)..(8): Table A2; Target 3313; MART1; ENSG00000120215; HLA-B*35:01;
VPNAPPAY

SEQ ID NO: 106156 - protein, 11 aa, Homo sapiens
  misc_feature (1)..(11): Table A2; Target 3314; MART1; ENSG00000120215; HLA-A*03:01;
VVPNAPPAYEK

SEQ ID NO: 106157 - protein, 11 aa, Homo sapiens
  misc_feature (1)..(11): Table A2; Target 3315; MART1; ENSG00000120215; HLA-A*03:02;
VVPNAPPAYEK

SEQ ID NO: 106158 - protein, 11 aa, Homo sapiens
  misc_feature (1)..(11): Table A2; Target 3316; MART1; ENSG00000120215; HLA-A*11:01;
VVPNAPPAYEK

SEQ ID NO: 106159 - protein, 9 aa, Homo sapiens
  misc_feature (1)..(9): Table A2; Target 3317; MART1; ENSG00000120215; HLA-A*25:01;
VVPNAPPAY

SEQ ID NO: 106160 - protein, 9 aa, Homo sapiens
  misc_feature (1)..(9): Table A2; Target 3318; MART1; ENSG00000120215; HLA-A*26:01;
VVPNAPPAY

SEQ ID NO: 106161 - protein, 9 aa, Homo sapiens
  misc_feature (1)..(9): Table A2; Target 3319; MART1; ENSG00000120215; HLA-A*29:02;
VVPNAPPAY

SEQ ID NO: 106162 - protein, 9 aa, Homo sapiens
  misc_feature (1)..(9): Table A2; Target 3320; MART1; ENSG00000120215; HLA-A*30:02;
VVPNAPPAY

SEQ ID NO: 106163 - protein, 9 aa, Homo sapiens
  misc_feature (1)..(9): Table A2; Target 3321; MART1; ENSG00000120215; HLA-A*32:01;
VVPNAPPAY

SEQ ID NO: 106164 - protein, 9 aa, Homo sapiens
  misc_feature (1)..(9): Table A2; Target 3322; MART1; ENSG00000120215; HLA-B*15:01;
VVPNAPPAY

SEQ ID NO: 106165 - protein, 9 aa, Homo sapiens
  misc_feature (1)..(9): Table A2; Target 3323; MART1; ENSG00000120215; HLA-B*46:01;
VVPNAPPAY

SEQ ID NO: 106166 - protein, 9 aa, Homo sapiens
  misc_feature (1)..(9): Table A2; Target 3324; MART1; ENSG00000120215; HLA-C*01:02;
VVPNAPPAY

SEQ ID NO: 106167 - protein, 9 aa, Homo sapiens
  misc_feature (1)..(9): Table A2; Target 3325; MART1; ENSG00000120215; HLA-C*07:04;
VVPNAPPAY

SEQ ID NO: 106168 - protein, 9 aa, Homo sapiens
  misc_feature (1)..(9): Table A2; Target 3326; MART1; ENSG00000120215; HLA-B*27:05;
YRALMDKSL

SEQ ID NO: 106169 - protein, 9 aa, Homo sapiens
  misc_feature (1)..(9): Table A2; Target 3327; MART1; ENSG00000120215; HLA-C*06:02;
YRALMDKSL

SEQ ID NO: 106170 - protein, 9 aa, Homo sapiens
  misc_feature (1)..(9): Table A2; Target 3328; MART1; ENSG00000120215; HLA-C*07:02;
YRALMDKSL

SEQ ID NO: 106171 - protein, 11 aa, Homo sapiens
  misc_feature (1)..(11): Table A2; Target 3329; MAGEA10; ENSG00000124260; HLA-A*30:01;
ACSSPSVVASL

SEQ ID NO: 106172 - protein, 11 aa, Homo sapiens
  misc_feature (1)..(11): Table A2; Target 3330; MAGEA10; ENSG00000124260; HLA-A*30:01;
AEILESVIRNY

SEQ ID NO: 106173 - protein, 11 aa, Homo sapiens
  misc_feature (1)..(11): Table A2; Target 3331; MAGEA10; ENSG00000124260; HLA-A*30:02;
AEILESVIRNY

SEQ ID NO: 106174 - protein, 11 aa, Homo sapiens
  misc_feature (1)..(11): Table A2; Target 3332; MAGEA10; ENSG00000124260; HLA-B*27:02;
AEILESVIRNY

SEQ ID NO: 106175 - protein, 11 aa, Homo sapiens
  misc_feature (1)..(11): Table A2; Target 3333; MAGEA10; ENSG00000124260; HLA-B*44:02;
AEILESVIRNY

SEQ ID NO: 106176 - protein, 11 aa, Homo sapiens
  misc_feature (1)..(11): Table A2; Target 3334; MAGEA10; ENSG00000124260; HLA-B*44:03;
AEILESVIRNY

SEQ ID NO: 106177 - protein, 11 aa, Homo sapiens
  misc_feature (1)..(11): Table A2; Target 3335; MAGEA10; ENSG00000124260; HLA-B*57:01;
AEILESVIRNY

SEQ ID NO: 106178 - protein, 11 aa, Homo sapiens
  misc_feature (1)..(11): Table A2; Target 3336; MAGEA10; ENSG00000124260; HLA-C*16:04;
AEILESVIRNY

SEQ ID NO: 106179 - protein, 10 aa, Homo sapiens
  misc_feature (1)..(10): Table A2; Target 3337; MAGEA10; ENSG00000124260; HLA-B*44:02;
AEILESVIRN

SEQ ID NO: 106180 - protein, 8 aa, Homo sapiens
  misc_feature (1)..(8): Table A2; Target 3338; MAGEA10; ENSG00000124260; HLA-A*30:01;
AEILESVI

SEQ ID NO: 106181 - protein, 8 aa, Homo sapiens
  misc_feature (1)..(8): Table A2; Target 3339; MAGEA10; ENSG00000124260; HLA-B*40:01;
AEILESVI

SEQ ID NO: 106182 - protein, 8 aa, Homo sapiens
  misc_feature (1)..(8): Table A2; Target 3340; MAGEA10; ENSG00000124260; HLA-B*44:02;
AEILESVI

SEQ ID NO: 106183 - protein, 8 aa, Homo sapiens
  misc_feature (1)..(8): Table A2; Target 3341; MAGEA10; ENSG00000124260; HLA-B*44:03;
AEILESVI

SEQ ID NO: 106184 - protein, 8 aa, Homo sapiens
  misc_feature (1)..(8): Table A2; Target 3342; MAGEA10; ENSG00000124260; HLA-B*49:01;
AEILESVI

SEQ ID NO: 106185 - protein, 9 aa, Homo sapiens
  misc_feature (1)..(9): Table A2; Target 3343; MAGEA10; ENSG00000124260; HLA-B*37:01;
AEIRKMSLL

SEQ ID NO: 106186 - protein, 9 aa, Homo sapiens
  misc_feature (1)..(9): Table A2; Target 3344; MAGEA10; ENSG00000124260; HLA-B*40:01;
AEIRKMSLL

SEQ ID NO: 106187 - protein, 9 aa, Homo sapiens
  misc_feature (1)..(9): Table A2; Target 3345; MAGEA10; ENSG00000124260; HLA-B*40:02;
AEIRKMSLL

SEQ ID NO: 106188 - protein, 9 aa, Homo sapiens
  misc_feature (1)..(9): Table A2; Target 3346; MAGEA10; ENSG00000124260; HLA-B*44:02;
AEIRKMSLL

SEQ ID NO: 106189 - protein, 9 aa, Homo sapiens
  misc_feature (1)..(9): Table A2; Target 3347; MAGEA10; ENSG00000124260; HLA-B*44:03;
AEIRKMSLL

SEQ ID NO: 106190 - protein, 9 aa, Homo sapiens
  misc_feature (1)..(9): Table A2; Target 3348; MAGEA10; ENSG00000124260; HLA-B*49:01;
AEIRKMSLL

SEQ ID NO: 106191 - protein, 8 aa, Homo sapiens
  misc_feature (1)..(8): Table A2; Target 3349; MAGEA10; ENSG00000124260; HLA-B*37:01;
AEIRKMSL

SEQ ID NO: 106192 - protein, 8 aa, Homo sapiens
  misc_feature (1)..(8): Table A2; Target 3350; MAGEA10; ENSG00000124260; HLA-B*40:02;
AEIRKMSL

SEQ ID NO: 106193 - protein, 11 aa, Homo sapiens
  misc_feature (1)..(11): Table A2; Target 3351; MAGEA10; ENSG00000124260; HLA-B*15:03;
AKVNGSDPRSF

SEQ ID NO: 106194 - protein, 8 aa, Homo sapiens
  misc_feature (1)..(8): Table A2; Target 3352; MAGEA10; ENSG00000124260; HLA-A*30:02;
ALNMMGLY

SEQ ID NO: 106195 - protein, 9 aa, Homo sapiens
  misc_feature (1)..(9): Table A2; Target 3353; MAGEA10; ENSG00000124260; HLA-A*02:03;
AMASASSSA

SEQ ID NO: 106196 - protein, 9 aa, Homo sapiens
  misc_feature (1)..(9): Table A2; Target 3354; MAGEA10; ENSG00000124260; HLA-A*32:01;
AMASASSSA

SEQ ID NO: 106197 - protein, 9 aa, Homo sapiens
  misc_feature (1)..(9): Table A2; Target 3355; MAGEA10; ENSG00000124260; HLA-B*55:01;
AMASASSSA

SEQ ID NO: 106198 - protein, 9 aa, Homo sapiens
  misc_feature (1)..(9): Table A2; Target 3356; MAGEA10; ENSG00000124260; HLA-C*01:02;
AMASASSSA

SEQ ID NO: 106199 - protein, 9 aa, Homo sapiens
  misc_feature (1)..(9): Table A2; Target 3357; MAGEA10; ENSG00000124260; HLA-C*14:02;
AMASASSSA

SEQ ID NO: 106200 - protein, 9 aa, Homo sapiens
  misc_feature (1)..(9): Table A2; Target 3358; MAGEA10; ENSG00000124260; HLA-B*56:01;
APLAVEEDA

SEQ ID NO: 106201 - protein, 9 aa, Homo sapiens
  misc_feature (1)..(9): Table A2; Target 3359; MAGEA10; ENSG00000124260; HLA-B*27:05;
AQAPLAVEE

SEQ ID NO: 106202 - protein, 10 aa, Homo sapiens
  misc_feature (1)..(10): Table A2; Target 3360; MAGEA10; ENSG00000124260; HLA-B*13:02;
AQIACSSPSV

SEQ ID NO: 106203 - protein, 11 aa, Homo sapiens
  misc_feature (1)..(11): Table A2; Target 3361; MAGEA10; ENSG00000124260; HLA-A*25:01;
ASASSSATGSF

SEQ ID NO: 106204 - protein, 11 aa, Homo sapiens
  misc_feature (1)..(11): Table A2; Target 3362; MAGEA10; ENSG00000124260; HLA-A*26:01;
ASASSSATGSF

SEQ ID NO: 106205 - protein, 11 aa, Homo sapiens
  misc_feature (1)..(11): Table A2; Target 3363; MAGEA10; ENSG00000124260; HLA-A*30:02;
ASASSSATGSF

SEQ ID NO: 106206 - protein, 11 aa, Homo sapiens
  misc_feature (1)..(11): Table A2; Target 3364; MAGEA10; ENSG00000124260; HLA-A*32:01;
ASASSSATGSF

SEQ ID NO: 106207 - protein, 11 aa, Homo sapiens
  misc_feature (1)..(11): Table A2; Target 3365; MAGEA10; ENSG00000124260; HLA-B*15:01;
ASASSSATGSF

SEQ ID NO: 106208 - protein, 11 aa, Homo sapiens
  misc_feature (1)..(11): Table A2; Target 3366; MAGEA10; ENSG00000124260; HLA-B*46:01;
ASASSSATGSF

SEQ ID NO: 106209 - protein, 11 aa, Homo sapiens
  misc_feature (1)..(11): Table A2; Target 3367; MAGEA10; ENSG00000124260; HLA-B*58:01;
ASASSSATGSF

SEQ ID NO: 106210 - protein, 11 aa, Homo sapiens
  misc_feature (1)..(11): Table A2; Target 3368; MAGEA10; ENSG00000124260; HLA-C*16:04;
ASASSSATGSF

SEQ ID NO: 106211 - protein, 11 aa, Homo sapiens
  misc_feature (1)..(11): Table A2; Target 3369; MAGEA10; ENSG00000124260; HLA-A*01:01;
ASSSATGSFSY

SEQ ID NO: 106212 - protein, 11 aa, Homo sapiens
  misc_feature (1)..(11): Table A2; Target 3370; MAGEA10; ENSG00000124260; HLA-A*03:02;
ASSSATGSFSY

SEQ ID NO: 106213 - protein, 11 aa, Homo sapiens
  misc_feature (1)..(11): Table A2; Target 3371; MAGEA10; ENSG00000124260; HLA-A*11:01;
ASSSATGSFSY

SEQ ID NO: 106214 - protein, 11 aa, Homo sapiens
  misc_feature (1)..(11): Table A2; Target 3372; MAGEA10; ENSG00000124260; HLA-A*26:01;
ASSSATGSFSY

SEQ ID NO: 106215 - protein, 11 aa, Homo sapiens
  misc_feature (1)..(11): Table A2; Target 3373; MAGEA10; ENSG00000124260; HLA-A*29:02;
ASSSATGSFSY

SEQ ID NO: 106216 - protein, 11 aa, Homo sapiens
  misc_feature (1)..(11): Table A2; Target 3374; MAGEA10; ENSG00000124260; HLA-A*30:02;
ASSSATGSFSY

SEQ ID NO: 106217 - protein, 11 aa, Homo sapiens
  misc_feature (1)..(11): Table A2; Target 3375; MAGEA10; ENSG00000124260; HLA-A*32:01;
ASSSATGSFSY

SEQ ID NO: 106218 - protein, 11 aa, Homo sapiens
  misc_feature (1)..(11): Table A2; Target 3376; MAGEA10; ENSG00000124260; HLA-B*58:01;
ASSSATGSFSY

SEQ ID NO: 106219 - protein, 11 aa, Homo sapiens
  misc_feature (1)..(11): Table A2; Target 3377; MAGEA10; ENSG00000124260; HLA-C*16:02;
ASSSATGSFSY

SEQ ID NO: 106220 - protein, 11 aa, Homo sapiens
  misc_feature (1)..(11): Table A2; Target 3378; MAGEA10; ENSG00000124260; HLA-C*16:04;
ASSSATGSFSY

SEQ ID NO: 106221 - protein, 9 aa, Homo sapiens
  misc_feature (1)..(9): Table A2; Target 3379; MAGEA10; ENSG00000124260; HLA-A*25:01;
ASSSATGSF

SEQ ID NO: 106222 - protein, 9 aa, Homo sapiens
  misc_feature (1)..(9): Table A2; Target 3380; MAGEA10; ENSG00000124260; HLA-A*26:01;
ASSSATGSF

SEQ ID NO: 106223 - protein, 9 aa, Homo sapiens
  misc_feature (1)..(9): Table A2; Target 3381; MAGEA10; ENSG00000124260; HLA-A*30:02;
ASSSATGSF

SEQ ID NO: 106224 - protein, 9 aa, Homo sapiens
  misc_feature (1)..(9): Table A2; Target 3382; MAGEA10; ENSG00000124260; HLA-A*32:01;
ASSSATGSF

SEQ ID NO: 106225 - protein, 9 aa, Homo sapiens
  misc_feature (1)..(9): Table A2; Target 3383; MAGEA10; ENSG00000124260; HLA-B*15:01;
ASSSATGSF

SEQ ID NO: 106226 - protein, 9 aa, Homo sapiens
  misc_feature (1)..(9): Table A2; Target 3384; MAGEA10; ENSG00000124260; HLA-B*15:03;
ASSSATGSF

SEQ ID NO: 106227 - protein, 9 aa, Homo sapiens
  misc_feature (1)..(9): Table A2; Target 3385; MAGEA10; ENSG00000124260; HLA-B*37:01;
ASSSATGSF

SEQ ID NO: 106228 - protein, 9 aa, Homo sapiens
  misc_feature (1)..(9): Table A2; Target 3386; MAGEA10; ENSG00000124260; HLA-B*46:01;
ASSSATGSF

SEQ ID NO: 106229 - protein, 9 aa, Homo sapiens
  misc_feature (1)..(9): Table A2; Target 3387; MAGEA10; ENSG00000124260; HLA-B*58:01;
ASSSATGSF

SEQ ID NO: 106230 - protein, 9 aa, Homo sapiens
  misc_feature (1)..(9): Table A2; Target 3388; MAGEA10; ENSG00000124260; HLA-C*01:02;
ASSSATGSF

SEQ ID NO: 106231 - protein, 9 aa, Homo sapiens
  misc_feature (1)..(9): Table A2; Target 3389; MAGEA10; ENSG00000124260; HLA-C*02:02;
ASSSATGSF

SEQ ID NO: 106232 - protein, 9 aa, Homo sapiens
  misc_feature (1)..(9): Table A2; Target 3390; MAGEA10; ENSG00000124260; HLA-C*03:03;
ASSSATGSF

SEQ ID NO: 106233 - protein, 9 aa, Homo sapiens
  misc_feature (1)..(9): Table A2; Target 3391; MAGEA10; ENSG00000124260; HLA-C*03:04;
ASSSATGSF

SEQ ID NO: 106234 - protein, 9 aa, Homo sapiens
  misc_feature (1)..(9): Table A2; Target 3392; MAGEA10; ENSG00000124260; HLA-C*05:01;
ASSSATGSF

SEQ ID NO: 106235 - protein, 9 aa, Homo sapiens
  misc_feature (1)..(9): Table A2; Target 3393; MAGEA10; ENSG00000124260; HLA-C*14:02;
ASSSATGSF

SEQ ID NO: 106236 - protein, 9 aa, Homo sapiens
  misc_feature (1)..(9): Table A2; Target 3394; MAGEA10; ENSG00000124260; HLA-C*16:01;
ASSSATGSF

SEQ ID NO: 106237 - protein, 9 aa, Homo sapiens
  misc_feature (1)..(9): Table A2; Target 3395; MAGEA10; ENSG00000124260; HLA-C*16:02;
ASSSATGSF

SEQ ID NO: 106238 - protein, 9 aa, Homo sapiens
  misc_feature (1)..(9): Table A2; Target 3396; MAGEA10; ENSG00000124260; HLA-C*16:04;
ASSSATGSF

SEQ ID NO: 106239 - protein, 11 aa, Homo sapiens
  misc_feature (1)..(11): Table A2; Target 3397; MAGEA10; ENSG00000124260; HLA-A*30:02;
ASSSTSTSSSF

SEQ ID NO: 106240 - protein, 11 aa, Homo sapiens
  misc_feature (1)..(11): Table A2; Target 3398; MAGEA10; ENSG00000124260; HLA-A*32:01;
ASSSTSTSSSF

SEQ ID NO: 106241 - protein, 11 aa, Homo sapiens
  misc_feature (1)..(11): Table A2; Target 3399; MAGEA10; ENSG00000124260; HLA-B*58:01;
ASSSTSTSSSF

SEQ ID NO: 106242 - protein, 9 aa, Homo sapiens
  misc_feature (1)..(9): Table A2; Target 3400; MAGEA10; ENSG00000124260; HLA-A*25:01;
ATTDDTTAM

SEQ ID NO: 106243 - protein, 9 aa, Homo sapiens
  misc_feature (1)..(9): Table A2; Target 3401; MAGEA10; ENSG00000124260; HLA-A*26:01;
ATTDDTTAM

SEQ ID NO: 106244 - protein, 9 aa, Homo sapiens
  misc_feature (1)..(9): Table A2; Target 3402; MAGEA10; ENSG00000124260; HLA-A*32:01;
ATTDDTTAM

SEQ ID NO: 106245 - protein, 9 aa, Homo sapiens
  misc_feature (1)..(9): Table A2; Target 3403; MAGEA10; ENSG00000124260; HLA-B*15:01;
ATTDDTTAM

SEQ ID NO: 106246 - protein, 9 aa, Homo sapiens
  misc_feature (1)..(9): Table A2; Target 3404; MAGEA10; ENSG00000124260; HLA-B*39:01;
ATTDDTTAM

SEQ ID NO: 106247 - protein, 9 aa, Homo sapiens
  misc_feature (1)..(9): Table A2; Target 3405; MAGEA10; ENSG00000124260; HLA-B*46:01;
ATTDDTTAM

SEQ ID NO: 106248 - protein, 9 aa, Homo sapiens
  misc_feature (1)..(9): Table A2; Target 3406; MAGEA10; ENSG00000124260; HLA-B*58:01;
ATTDDTTAM

SEQ ID NO: 106249 - protein, 9 aa, Homo sapiens
  misc_feature (1)..(9): Table A2; Target 3407; MAGEA10; ENSG00000124260; HLA-C*01:02;
ATTDDTTAM

SEQ ID NO: 106250 - protein, 9 aa, Homo sapiens
  misc_feature (1)..(9): Table A2; Target 3408; MAGEA10; ENSG00000124260; HLA-C*02:02;
ATTDDTTAM

SEQ ID NO: 106251 - protein, 9 aa, Homo sapiens
  misc_feature (1)..(9): Table A2; Target 3409; MAGEA10; ENSG00000124260; HLA-C*03:03;
ATTDDTTAM

SEQ ID NO: 106252 - protein, 9 aa, Homo sapiens
  misc_feature (1)..(9): Table A2; Target 3410; MAGEA10; ENSG00000124260; HLA-C*03:04;
ATTDDTTAM

SEQ ID NO: 106253 - protein, 9 aa, Homo sapiens
  misc_feature (1)..(9): Table A2; Target 3411; MAGEA10; ENSG00000124260; HLA-C*04:01;
ATTDDTTAM

SEQ ID NO: 106254 - protein, 9 aa, Homo sapiens
  misc_feature (1)..(9): Table A2; Target 3412; MAGEA10; ENSG00000124260; HLA-C*05:01;
ATTDDTTAM

SEQ ID NO: 106255 - protein, 9 aa, Homo sapiens
  misc_feature (1)..(9): Table A2; Target 3413; MAGEA10; ENSG00000124260; HLA-C*07:06;
ATTDDTTAM

SEQ ID NO: 106256 - protein, 9 aa, Homo sapiens
  misc_feature (1)..(9): Table A2; Target 3414; MAGEA10; ENSG00000124260; HLA-C*12:03;
ATTDDTTAM

SEQ ID NO: 106257 - protein, 9 aa, Homo sapiens
  misc_feature (1)..(9): Table A2; Target 3415; MAGEA10; ENSG00000124260; HLA-C*14:02;
ATTDDTTAM

SEQ ID NO: 106258 - protein, 9 aa, Homo sapiens
  misc_feature (1)..(9): Table A2; Target 3416; MAGEA10; ENSG00000124260; HLA-C*16:01;
ATTDDTTAM

SEQ ID NO: 106259 - protein, 9 aa, Homo sapiens
  misc_feature (1)..(9): Table A2; Target 3417; MAGEA10; ENSG00000124260; HLA-C*16:02;
ATTDDTTAM

SEQ ID NO: 106260 - protein, 9 aa, Homo sapiens
  misc_feature (1)..(9): Table A2; Target 3418; MAGEA10; ENSG00000124260; HLA-C*16:04;
ATTDDTTAM

SEQ ID NO: 106261 - protein, 11 aa, Homo sapiens
  misc_feature (1)..(11): Table A2; Target 3419; MAGEA10; ENSG00000124260; HLA-B*39:01;
DDETPNPPQSA

SEQ ID NO: 106262 - protein, 10 aa, Homo sapiens
  misc_feature (1)..(10): Table A2; Target 3420; MAGEA10; ENSG00000124260; HLA-B*18:01;
DEKVTDLVQF

SEQ ID NO: 106263 - protein, 10 aa, Homo sapiens
  misc_feature (1)..(10): Table A2; Target 3421; MAGEA10; ENSG00000124260; HLA-B*44:02;
DEKVTDLVQF

SEQ ID NO: 106264 - protein, 8 aa, Homo sapiens
  misc_feature (1)..(8): Table A2; Target 3422; MAGEA10; ENSG00000124260; HLA-B*18:01;
DEKVTDLV

SEQ ID NO: 106265 - protein, 8 aa, Homo sapiens
  misc_feature (1)..(8): Table A2; Target 3423; MAGEA10; ENSG00000124260; HLA-B*49:01;
DEKVTDLV

SEQ ID NO: 106266 - protein, 10 aa, Homo sapiens
  misc_feature (1)..(10): Table A2; Target 3424; MAGEA10; ENSG00000124260; HLA-B*18:01;
DETPNPPQSA

SEQ ID NO: 106267 - protein, 9 aa, Homo sapiens
  misc_feature (1)..(9): Table A2; Target 3425; MAGEA10; ENSG00000124260; HLA-B*18:01;
DETPNPPQS

SEQ ID NO: 106268 - protein, 8 aa, Homo sapiens
  misc_feature (1)..(8): Table A2; Target 3426; MAGEA10; ENSG00000124260; HLA-B*18:01;
DETPNPPQ

SEQ ID NO: 106269 - protein, 8 aa, Homo sapiens
  misc_feature (1)..(8): Table A2; Target 3427; MAGEA10; ENSG00000124260; HLA-B*08:01;
DGMEHLIY

SEQ ID NO: 106270 - protein, 8 aa, Homo sapiens
  misc_feature (1)..(8): Table A2; Target 3428; MAGEA10; ENSG00000124260; HLA-B*18:01;
DGMEHLIY

SEQ ID NO: 106271 - protein, 8 aa, Homo sapiens
  misc_feature (1)..(8): Table A2; Target 3429; MAGEA10; ENSG00000124260; HLA-B*35:01;
DGMEHLIY

SEQ ID NO: 106272 - protein, 8 aa, Homo sapiens
  misc_feature (1)..(8): Table A2; Target 3430; MAGEA10; ENSG00000124260; HLA-C*07:01;
DGMEHLIY

SEQ ID NO: 106273 - protein, 8 aa, Homo sapiens
  misc_feature (1)..(8): Table A2; Target 3431; MAGEA10; ENSG00000124260; HLA-C*12:03;
DGMEHLIY

SEQ ID NO: 106274 - protein, 10 aa, Homo sapiens
  misc_feature (1)..(10): Table A2; Target 3432; MAGEA10; ENSG00000124260; HLA-B*51:01;
DGMLSDVQSM

SEQ ID NO: 106275 - protein, 9 aa, Homo sapiens
  misc_feature (1)..(9): Table A2; Target 3433; MAGEA10; ENSG00000124260; HLA-B*08:01;
DPTGHSFVL

SEQ ID NO: 106276 - protein, 9 aa, Homo sapiens
  misc_feature (1)..(9): Table A2; Target 3434; MAGEA10; ENSG00000124260; HLA-B*35:01;
DPTGHSFVL

SEQ ID NO: 106277 - protein, 9 aa, Homo sapiens
  misc_feature (1)..(9): Table A2; Target 3435; MAGEA10; ENSG00000124260; HLA-B*35:03;
DPTGHSFVL

SEQ ID NO: 106278 - protein, 8 aa, Homo sapiens
  misc_feature (1)..(8): Table A2; Target 3436; MAGEA10; ENSG00000124260; HLA-B*51:01;
DPTGHSFV

SEQ ID NO: 106279 - protein, 10 aa, Homo sapiens
  misc_feature (1)..(10): Table A2; Target 3437; MAGEA10; ENSG00000124260; HLA-A*26:01;
DVKEVDPTGH

SEQ ID NO: 106280 - protein, 10 aa, Homo sapiens
  misc_feature (1)..(10): Table A2; Target 3438; MAGEA10; ENSG00000124260; HLA-A*33:01;
DVKEVDPTGH

SEQ ID NO: 106281 - protein, 10 aa, Homo sapiens
  misc_feature (1)..(10): Table A2; Target 3439; MAGEA10; ENSG00000124260; HLA-A*68:01;
DVKEVDPTGH

SEQ ID NO: 106282 - protein, 9 aa, Homo sapiens
  misc_feature (1)..(9): Table A2; Target 3440; MAGEA10; ENSG00000124260; HLA-A*01:01;
EALNMMGLY

SEQ ID NO: 106283 - protein, 9 aa, Homo sapiens
  misc_feature (1)..(9): Table A2; Target 3441; MAGEA10; ENSG00000124260; HLA-A*25:01;
EALNMMGLY

SEQ ID NO: 106284 - protein, 9 aa, Homo sapiens
  misc_feature (1)..(9): Table A2; Target 3442; MAGEA10; ENSG00000124260; HLA-A*26:01;
EALNMMGLY

SEQ ID NO: 106285 - protein, 9 aa, Homo sapiens
  misc_feature (1)..(9): Table A2; Target 3443; MAGEA10; ENSG00000124260; HLA-A*29:02;
EALNMMGLY

SEQ ID NO: 106286 - protein, 9 aa, Homo sapiens
  misc_feature (1)..(9): Table A2; Target 3444; MAGEA10; ENSG00000124260; HLA-B*35:01;
EALNMMGLY

SEQ ID NO: 106287 - protein, 8 aa, Homo sapiens
  misc_feature (1)..(8): Table A2; Target 3445; MAGEA10; ENSG00000124260; HLA-B*51:01;
EALNMMGL

SEQ ID NO: 106288 - protein, 9 aa, Homo sapiens
  misc_feature (1)..(9): Table A2; Target 3446; MAGEA10; ENSG00000124260; HLA-A*68:02;
EASECMLLV

SEQ ID NO: 106289 - protein, 9 aa, Homo sapiens
  misc_feature (1)..(9): Table A2; Target 3447; MAGEA10; ENSG00000124260; HLA-B*51:01;
EASECMLLV

SEQ ID NO: 106290 - protein, 8 aa, Homo sapiens
  misc_feature (1)..(8): Table A2; Target 3448; MAGEA10; ENSG00000124260; HLA-C*07:01;
EDHFPLLF

SEQ ID NO: 106291 - protein, 10 aa, Homo sapiens
  misc_feature (1)..(10): Table A2; Target 3449; MAGEA10; ENSG00000124260; HLA-A*25:01;
EESPSTLQVL

SEQ ID NO: 106292 - protein, 10 aa, Homo sapiens
  misc_feature (1)..(10): Table A2; Target 3450; MAGEA10; ENSG00000124260; HLA-A*30:01;
EESPSTLQVL

SEQ ID NO: 106293 - protein, 10 aa, Homo sapiens
  misc_feature (1)..(10): Table A2; Target 3451; MAGEA10; ENSG00000124260; HLA-B*27:02;
EESPSTLQVL

SEQ ID NO: 106294 - protein, 10 aa, Homo sapiens
  misc_feature (1)..(10): Table A2; Target 3452; MAGEA10; ENSG00000124260; HLA-B*38:01;
EESPSTLQVL

SEQ ID NO: 106295 - protein, 10 aa, Homo sapiens
  misc_feature (1)..(10): Table A2; Target 3453; MAGEA10; ENSG00000124260; HLA-B*39:01;
EESPSTLQVL

SEQ ID NO: 106296 - protein, 10 aa, Homo sapiens
  misc_feature (1)..(10): Table A2; Target 3454; MAGEA10; ENSG00000124260; HLA-B*40:01;
EESPSTLQVL

SEQ ID NO: 106297 - protein, 10 aa, Homo sapiens
  misc_feature (1)..(10): Table A2; Target 3455; MAGEA10; ENSG00000124260; HLA-B*40:02;
EESPSTLQVL

SEQ ID NO: 106298 - protein, 10 aa, Homo sapiens
  misc_feature (1)..(10): Table A2; Target 3456; MAGEA10; ENSG00000124260; HLA-B*44:02;
EESPSTLQVL

SEQ ID NO: 106299 - protein, 10 aa, Homo sapiens
  misc_feature (1)..(10): Table A2; Target 3457; MAGEA10; ENSG00000124260; HLA-B*44:03;
EESPSTLQVL

SEQ ID NO: 106300 - protein, 9 aa, Homo sapiens
  misc_feature (1)..(9): Table A2; Target 3458; MAGEA10; ENSG00000124260; HLA-A*30:01;
EESPSTLQV

SEQ ID NO: 106301 - protein, 9 aa, Homo sapiens
  misc_feature (1)..(9): Table A2; Target 3459; MAGEA10; ENSG00000124260; HLA-B*13:02;
EESPSTLQV

SEQ ID NO: 106302 - protein, 9 aa, Homo sapiens
  misc_feature (1)..(9): Table A2; Target 3460; MAGEA10; ENSG00000124260; HLA-B*18:01;
EESPSTLQV

SEQ ID NO: 106303 - protein, 9 aa, Homo sapiens
  misc_feature (1)..(9): Table A2; Target 3461; MAGEA10; ENSG00000124260; HLA-B*37:01;
EESPSTLQV

SEQ ID NO: 106304 - protein, 9 aa, Homo sapiens
  misc_feature (1)..(9): Table A2; Target 3462; MAGEA10; ENSG00000124260; HLA-B*40:01;
EESPSTLQV

SEQ ID NO: 106305 - protein, 9 aa, Homo sapiens
  misc_feature (1)..(9): Table A2; Target 3463; MAGEA10; ENSG00000124260; HLA-B*44:02;
EESPSTLQV

SEQ ID NO: 106306 - protein, 9 aa, Homo sapiens
  misc_feature (1)..(9): Table A2; Target 3464; MAGEA10; ENSG00000124260; HLA-B*44:03;
EESPSTLQV

SEQ ID NO: 106307 - protein, 9 aa, Homo sapiens
  misc_feature (1)..(9): Table A2; Target 3465; MAGEA10; ENSG00000124260; HLA-B*49:01;
EESPSTLQV

SEQ ID NO: 106308 - protein, 8 aa, Homo sapiens
  misc_feature (1)..(8): Table A2; Target 3466; MAGEA10; ENSG00000124260; HLA-B*18:01;
EEVIWEAL

SEQ ID NO: 106309 - protein, 9 aa, Homo sapiens
  misc_feature (1)..(9): Table A2; Target 3467; MAGEA10; ENSG00000124260; HLA-B*13:02;
EGAQAPLAV

SEQ ID NO: 106310 - protein, 9 aa, Homo sapiens
  misc_feature (1)..(9): Table A2; Target 3468; MAGEA10; ENSG00000124260; HLA-B*51:01;
EGAQAPLAV

SEQ ID NO: 106311 - protein, 9 aa, Homo sapiens
  misc_feature (1)..(9): Table A2; Target 3469; MAGEA10; ENSG00000124260; HLA-A*33:01;
EHLIYGEPR

SEQ ID NO: 106312 - protein, 9 aa, Homo sapiens
  misc_feature (1)..(9): Table A2; Target 3470; MAGEA10; ENSG00000124260; HLA-A*33:03;
EHLIYGEPR

SEQ ID NO: 106313 - protein, 9 aa, Homo sapiens
  misc_feature (1)..(9): Table A2; Target 3471; MAGEA10; ENSG00000124260; HLA-A*02:07;
EIDEKVTDL

SEQ ID NO: 106314 - protein, 9 aa, Homo sapiens
  misc_feature (1)..(9): Table A2; Target 3472; MAGEA10; ENSG00000124260; HLA-C*05:01;
EIDEKVTDL

SEQ ID NO: 106315 - protein, 10 aa, Homo sapiens
  misc_feature (1)..(10): Table A2; Target 3473; MAGEA10; ENSG00000124260; HLA-A*25:01;
EILESVIRNY

SEQ ID NO: 106316 - protein, 10 aa, Homo sapiens
  misc_feature (1)..(10): Table A2; Target 3474; MAGEA10; ENSG00000124260; HLA-A*26:01;
EILESVIRNY

SEQ ID NO: 106317 - protein, 10 aa, Homo sapiens
  misc_feature (1)..(10): Table A2; Target 3475; MAGEA10; ENSG00000124260; HLA-A*29:02;
EILESVIRNY

SEQ ID NO: 106318 - protein, 10 aa, Homo sapiens
  misc_feature (1)..(10): Table A2; Target 3476; MAGEA10; ENSG00000124260; HLA-A*30:02;
EILESVIRNY

SEQ ID NO: 106319 - protein, 10 aa, Homo sapiens
  misc_feature (1)..(10): Table A2; Target 3477; MAGEA10; ENSG00000124260; HLA-A*33:01;
EILESVIRNY

SEQ ID NO: 106320 - protein, 10 aa, Homo sapiens
  misc_feature (1)..(10): Table A2; Target 3478; MAGEA10; ENSG00000124260; HLA-A*33:03;
EILESVIRNY

SEQ ID NO: 106321 - protein, 10 aa, Homo sapiens
  misc_feature (1)..(10): Table A2; Target 3479; MAGEA10; ENSG00000124260; HLA-B*44:02;
EILESVIRNY

SEQ ID NO: 106322 - protein, 10 aa, Homo sapiens
  misc_feature (1)..(10): Table A2; Target 3480; MAGEA10; ENSG00000124260; HLA-B*44:03;
EILESVIRNY

SEQ ID NO: 106323 - protein, 10 aa, Homo sapiens
  misc_feature (1)..(10): Table A2; Target 3481; MAGEA10; ENSG00000124260; HLA-C*07:06;
EILESVIRNY

SEQ ID NO: 106324 - protein, 8 aa, Homo sapiens
  misc_feature (1)..(8): Table A2; Target 3482; MAGEA10; ENSG00000124260; HLA-A*33:03;
EILESVIR

SEQ ID NO: 106325 - protein, 9 aa, Homo sapiens
  misc_feature (1)..(9): Table A2; Target 3483; MAGEA10; ENSG00000124260; HLA-A*23:01;
EKVTDLVQF

SEQ ID NO: 106326 - protein, 9 aa, Homo sapiens
  misc_feature (1)..(9): Table A2; Target 3484; MAGEA10; ENSG00000124260; HLA-B*07:02;
EPITKAEIL

SEQ ID NO: 106327 - protein, 9 aa, Homo sapiens
  misc_feature (1)..(9): Table A2; Target 3485; MAGEA10; ENSG00000124260; HLA-B*08:01;
EPITKAEIL

SEQ ID NO: 106328 - protein, 9 aa, Homo sapiens
  misc_feature (1)..(9): Table A2; Target 3486; MAGEA10; ENSG00000124260; HLA-B*35:01;
EPITKAEIL

SEQ ID NO: 106329 - protein, 9 aa, Homo sapiens
  misc_feature (1)..(9): Table A2; Target 3487; MAGEA10; ENSG00000124260; HLA-B*35:03;
EPITKAEIL

SEQ ID NO: 106330 - protein, 9 aa, Homo sapiens
  misc_feature (1)..(9): Table A2; Target 3488; MAGEA10; ENSG00000124260; HLA-C*07:02;
EPITKAEIL

SEQ ID NO: 106331 - protein, 8 aa, Homo sapiens
  misc_feature (1)..(8): Table A2; Target 3489; MAGEA10; ENSG00000124260; HLA-B*08:01;
EPITKAEI

SEQ ID NO: 106332 - protein, 8 aa, Homo sapiens
  misc_feature (1)..(8): Table A2; Target 3490; MAGEA10; ENSG00000124260; HLA-B*51:01;
EPITKAEI

SEQ ID NO: 106333 - protein, 11 aa, Homo sapiens
  misc_feature (1)..(11): Table A2; Target 3491; MAGEA10; ENSG00000124260; HLA-A*33:01;
ESLPRSEIDEK

SEQ ID NO: 106334 - protein, 9 aa, Homo sapiens
  misc_feature (1)..(9): Table A2; Target 3492; MAGEA10; ENSG00000124260; HLA-A*25:01;
ESPSTLQVL

SEQ ID NO: 106335 - protein, 9 aa, Homo sapiens
  misc_feature (1)..(9): Table A2; Target 3493; MAGEA10; ENSG00000124260; HLA-C*01:02;
ESPSTLQVL

SEQ ID NO: 106336 - protein, 11 aa, Homo sapiens
  misc_feature (1)..(11): Table A2; Target 3494; MAGEA10; ENSG00000124260; HLA-A*26:01;
ETPNPPQSAQI

SEQ ID NO: 106337 - protein, 11 aa, Homo sapiens
  misc_feature (1)..(11): Table A2; Target 3495; MAGEA10; ENSG00000124260; HLA-A*68:02;
ETPNPPQSAQI

SEQ ID NO: 106338 - protein, 9 aa, Homo sapiens
  misc_feature (1)..(9): Table A2; Target 3496; MAGEA10; ENSG00000124260; HLA-A*33:03;
ETPNPPQSA

SEQ ID NO: 106339 - protein, 11 aa, Homo sapiens
  misc_feature (1)..(11): Table A2; Target 3497; MAGEA10; ENSG00000124260; HLA-A*01:01;
EVDPTGHSFVL

SEQ ID NO: 106340 - protein, 11 aa, Homo sapiens
  misc_feature (1)..(11): Table A2; Target 3498; MAGEA10; ENSG00000124260; HLA-A*02:07;
EVDPTGHSFVL

SEQ ID NO: 106341 - protein, 11 aa, Homo sapiens
  misc_feature (1)..(11): Table A2; Target 3499; MAGEA10; ENSG00000124260; HLA-A*68:02;
EVDPTGHSFVL

SEQ ID NO: 106342 - protein, 11 aa, Homo sapiens
  misc_feature (1)..(11): Table A2; Target 3500; MAGEA10; ENSG00000124260; HLA-B*35:03;
EVDPTGHSFVL

SEQ ID NO: 106343 - protein, 11 aa, Homo sapiens
  misc_feature (1)..(11): Table A2; Target 3501; MAGEA10; ENSG00000124260; HLA-B*38:01;
EVDPTGHSFVL

SEQ ID NO: 106344 - protein, 11 aa, Homo sapiens
  misc_feature (1)..(11): Table A2; Target 3502; MAGEA10; ENSG00000124260; HLA-C*05:01;
EVDPTGHSFVL

SEQ ID NO: 106345 - protein, 10 aa, Homo sapiens
  misc_feature (1)..(10): Table A2; Target 3503; MAGEA10; ENSG00000124260; HLA-A*01:01;
EVDPTGHSFV

SEQ ID NO: 106346 - protein, 10 aa, Homo sapiens
  misc_feature (1)..(10): Table A2; Target 3504; MAGEA10; ENSG00000124260; HLA-A*26:01;
EVDPTGHSFV

SEQ ID NO: 106347 - protein, 10 aa, Homo sapiens
  misc_feature (1)..(10): Table A2; Target 3505; MAGEA10; ENSG00000124260; HLA-A*68:02;
EVDPTGHSFV

SEQ ID NO: 106348 - protein, 10 aa, Homo sapiens
  misc_feature (1)..(10): Table A2; Target 3506; MAGEA10; ENSG00000124260; HLA-C*05:01;
EVDPTGHSFV

SEQ ID NO: 106349 - protein, 9 aa, Homo sapiens
  misc_feature (1)..(9): Table A2; Target 3507; MAGEA10; ENSG00000124260; HLA-A*01:01;
EVDPTGHSF

SEQ ID NO: 106350 - protein, 9 aa, Homo sapiens
  misc_feature (1)..(9): Table A2; Target 3508; MAGEA10; ENSG00000124260; HLA-A*02:07;
EVDPTGHSF

SEQ ID NO: 106351 - protein, 9 aa, Homo sapiens
  misc_feature (1)..(9): Table A2; Target 3509; MAGEA10; ENSG00000124260; HLA-A*23:01;
EVDPTGHSF

SEQ ID NO: 106352 - protein, 9 aa, Homo sapiens
  misc_feature (1)..(9): Table A2; Target 3510; MAGEA10; ENSG00000124260; HLA-A*24:02;
EVDPTGHSF

SEQ ID NO: 106353 - protein, 9 aa, Homo sapiens
  misc_feature (1)..(9): Table A2; Target 3511; MAGEA10; ENSG00000124260; HLA-A*25:01;
EVDPTGHSF

SEQ ID NO: 106354 - protein, 9 aa, Homo sapiens
  misc_feature (1)..(9): Table A2; Target 3512; MAGEA10; ENSG00000124260; HLA-A*26:01;
EVDPTGHSF

SEQ ID NO: 106355 - protein, 9 aa, Homo sapiens
  misc_feature (1)..(9): Table A2; Target 3513; MAGEA10; ENSG00000124260; HLA-A*29:02;
EVDPTGHSF

SEQ ID NO: 106356 - protein, 9 aa, Homo sapiens
  misc_feature (1)..(9): Table A2; Target 3514; MAGEA10; ENSG00000124260; HLA-A*30:02;
EVDPTGHSF

SEQ ID NO: 106357 - protein, 9 aa, Homo sapiens
  misc_feature (1)..(9): Table A2; Target 3515; MAGEA10; ENSG00000124260; HLA-A*32:01;
EVDPTGHSF

SEQ ID NO: 106358 - protein, 9 aa, Homo sapiens
  misc_feature (1)..(9): Table A2; Target 3516; MAGEA10; ENSG00000124260; HLA-A*33:01;
EVDPTGHSF

SEQ ID NO: 106359 - protein, 9 aa, Homo sapiens
  misc_feature (1)..(9): Table A2; Target 3517; MAGEA10; ENSG00000124260; HLA-A*33:03;
EVDPTGHSF

SEQ ID NO: 106360 - protein, 9 aa, Homo sapiens
  misc_feature (1)..(9): Table A2; Target 3518; MAGEA10; ENSG00000124260; HLA-A*68:01;
EVDPTGHSF

SEQ ID NO: 106361 - protein, 9 aa, Homo sapiens
  misc_feature (1)..(9): Table A2; Target 3519; MAGEA10; ENSG00000124260; HLA-B*15:01;
EVDPTGHSF

SEQ ID NO: 106362 - protein, 9 aa, Homo sapiens
  misc_feature (1)..(9): Table A2; Target 3520; MAGEA10; ENSG00000124260; HLA-B*15:03;
EVDPTGHSF

SEQ ID NO: 106363 - protein, 9 aa, Homo sapiens
  misc_feature (1)..(9): Table A2; Target 3521; MAGEA10; ENSG00000124260; HLA-B*18:01;
EVDPTGHSF

SEQ ID NO: 106364 - protein, 9 aa, Homo sapiens
  misc_feature (1)..(9): Table A2; Target 3522; MAGEA10; ENSG00000124260; HLA-B*27:05;
EVDPTGHSF

SEQ ID NO: 106365 - protein, 9 aa, Homo sapiens
  misc_feature (1)..(9): Table A2; Target 3523; MAGEA10; ENSG00000124260; HLA-B*35:01;
EVDPTGHSF

SEQ ID NO: 106366 - protein, 9 aa, Homo sapiens
  misc_feature (1)..(9): Table A2; Target 3524; MAGEA10; ENSG00000124260; HLA-B*35:03;
EVDPTGHSF

SEQ ID NO: 106367 - protein, 9 aa, Homo sapiens
  misc_feature (1)..(9): Table A2; Target 3525; MAGEA10; ENSG00000124260; HLA-B*38:01;
EVDPTGHSF

SEQ ID NO: 106368 - protein, 9 aa, Homo sapiens
  misc_feature (1)..(9): Table A2; Target 3526; MAGEA10; ENSG00000124260; HLA-B*39:01;
EVDPTGHSF

SEQ ID NO: 106369 - protein, 9 aa, Homo sapiens
  misc_feature (1)..(9): Table A2; Target 3527; MAGEA10; ENSG00000124260; HLA-B*44:02;
EVDPTGHSF

SEQ ID NO: 106370 - protein, 9 aa, Homo sapiens
  misc_feature (1)..(9): Table A2; Target 3528; MAGEA10; ENSG00000124260; HLA-B*44:03;
EVDPTGHSF

SEQ ID NO: 106371 - protein, 9 aa, Homo sapiens
  misc_feature (1)..(9): Table A2; Target 3529; MAGEA10; ENSG00000124260; HLA-B*46:01;
EVDPTGHSF

SEQ ID NO: 106372 - protein, 9 aa, Homo sapiens
  misc_feature (1)..(9): Table A2; Target 3530; MAGEA10; ENSG00000124260; HLA-B*55:01;
EVDPTGHSF

SEQ ID NO: 106373 - protein, 9 aa, Homo sapiens
  misc_feature (1)..(9): Table A2; Target 3531; MAGEA10; ENSG00000124260; HLA-B*57:01;
EVDPTGHSF

SEQ ID NO: 106374 - protein, 9 aa, Homo sapiens
  misc_feature (1)..(9): Table A2; Target 3532; MAGEA10; ENSG00000124260; HLA-B*58:01;
EVDPTGHSF

SEQ ID NO: 106375 - protein, 9 aa, Homo sapiens
  misc_feature (1)..(9): Table A2; Target 3533; MAGEA10; ENSG00000124260; HLA-C*02:02;
EVDPTGHSF

SEQ ID NO: 106376 - protein, 9 aa, Homo sapiens
  misc_feature (1)..(9): Table A2; Target 3534; MAGEA10; ENSG00000124260; HLA-C*03:03;
EVDPTGHSF

SEQ ID NO: 106377 - protein, 9 aa, Homo sapiens
  misc_feature (1)..(9): Table A2; Target 3535; MAGEA10; ENSG00000124260; HLA-C*03:04;
EVDPTGHSF

SEQ ID NO: 106378 - protein, 9 aa, Homo sapiens
  misc_feature (1)..(9): Table A2; Target 3536; MAGEA10; ENSG00000124260; HLA-C*04:01;
EVDPTGHSF

SEQ ID NO: 106379 - protein, 9 aa, Homo sapiens
  misc_feature (1)..(9): Table A2; Target 3537; MAGEA10; ENSG00000124260; HLA-C*05:01;
EVDPTGHSF

SEQ ID NO: 106380 - protein, 9 aa, Homo sapiens
  misc_feature (1)..(9): Table A2; Target 3538; MAGEA10; ENSG00000124260; HLA-C*07:04;
EVDPTGHSF

SEQ ID NO: 106381 - protein, 9 aa, Homo sapiens
  misc_feature (1)..(9): Table A2; Target 3539; MAGEA10; ENSG00000124260; HLA-C*07:06;
EVDPTGHSF

SEQ ID NO: 106382 - protein, 9 aa, Homo sapiens
  misc_feature (1)..(9): Table A2; Target 3540; MAGEA10; ENSG00000124260; HLA-C*14:02;
EVDPTGHSF

SEQ ID NO: 106383 - protein, 9 aa, Homo sapiens
  misc_feature (1)..(9): Table A2; Target 3541; MAGEA10; ENSG00000124260; HLA-C*16:02;
EVDPTGHSF

SEQ ID NO: 106384 - protein, 9 aa, Homo sapiens
  misc_feature (1)..(9): Table A2; Target 3542; MAGEA10; ENSG00000124260; HLA-C*16:04;
EVDPTGHSF

SEQ ID NO: 106385 - protein, 10 aa, Homo sapiens
  misc_feature (1)..(10): Table A2; Target 3543; MAGEA10; ENSG00000124260; HLA-A*25:01;
EVIWEALNMM

SEQ ID NO: 106386 - protein, 10 aa, Homo sapiens
  misc_feature (1)..(10): Table A2; Target 3544; MAGEA10; ENSG00000124260; HLA-A*26:01;
EVIWEALNMM

SEQ ID NO: 106387 - protein, 9 aa, Homo sapiens
  misc_feature (1)..(9): Table A2; Target 3545; MAGEA10; ENSG00000124260; HLA-A*25:01;
EVIWEALNM

SEQ ID NO: 106388 - protein, 9 aa, Homo sapiens
  misc_feature (1)..(9): Table A2; Target 3546; MAGEA10; ENSG00000124260; HLA-A*26:01;
EVIWEALNM

SEQ ID NO: 106389 - protein, 8 aa, Homo sapiens
  misc_feature (1)..(8): Table A2; Target 3547; MAGEA10; ENSG00000124260; HLA-B*51:01;
FGIDVKEV

SEQ ID NO: 106390 - protein, 8 aa, Homo sapiens
  misc_feature (1)..(8): Table A2; Target 3548; MAGEA10; ENSG00000124260; HLA-C*12:03;
FGIDVKEV

SEQ ID NO: 106391 - protein, 8 aa, Homo sapiens
  misc_feature (1)..(8): Table A2; Target 3549; MAGEA10; ENSG00000124260; HLA-C*16:02;
FGIDVKEV

SEQ ID NO: 106392 - protein, 11 aa, Homo sapiens
  misc_feature (1)..(11): Table A2; Target 3550; MAGEA10; ENSG00000124260; HLA-A*02:01;
FLWGPRAHAEI

SEQ ID NO: 106393 - protein, 11 aa, Homo sapiens
  misc_feature (1)..(11): Table A2; Target 3551; MAGEA10; ENSG00000124260; HLA-A*02:07;
FLWGPRAHAEI

SEQ ID NO: 106394 - protein, 11 aa, Homo sapiens
  misc_feature (1)..(11): Table A2; Target 3552; MAGEA10; ENSG00000124260; HLA-B*54:01;
FPLLFSEASEC

SEQ ID NO: 106395 - protein, 9 aa, Homo sapiens
  misc_feature (1)..(9): Table A2; Target 3553; MAGEA10; ENSG00000124260; HLA-B*54:01;
FPLLFSEAS

SEQ ID NO: 106396 - protein, 8 aa, Homo sapiens
  misc_feature (1)..(8): Table A2; Target 3554; MAGEA10; ENSG00000124260; HLA-B*51:01;
FPLLFSEA

SEQ ID NO: 106397 - protein, 8 aa, Homo sapiens
  misc_feature (1)..(8): Table A2; Target 3555; MAGEA10; ENSG00000124260; HLA-B*54:01;
FPLLFSEA

SEQ ID NO: 106398 - protein, 8 aa, Homo sapiens
  misc_feature (1)..(8): Table A2; Target 3556; MAGEA10; ENSG00000124260; HLA-B*55:01;
FPLLFSEA

SEQ ID NO: 106399 - protein, 8 aa, Homo sapiens
  misc_feature (1)..(8): Table A2; Target 3557; MAGEA10; ENSG00000124260; HLA-B*56:01;
FPLLFSEA

SEQ ID NO: 106400 - protein, 9 aa, Homo sapiens
  misc_feature (1)..(9): Table A2; Target 3558; MAGEA10; ENSG00000124260; HLA-B*35:01;
FPLWYEEAL

SEQ ID NO: 106401 - protein, 9 aa, Homo sapiens
  misc_feature (1)..(9): Table A2; Target 3559; MAGEA10; ENSG00000124260; HLA-B*35:03;
FPLWYEEAL

SEQ ID NO: 106402 - protein, 9 aa, Homo sapiens
  misc_feature (1)..(9): Table A2; Target 3560; MAGEA10; ENSG00000124260; HLA-B*54:01;
FPLWYEEAL

SEQ ID NO: 106403 - protein, 8 aa, Homo sapiens
  misc_feature (1)..(8): Table A2; Target 3561; MAGEA10; ENSG00000124260; HLA-B*54:01;
FPLWYEEA

SEQ ID NO: 106404 - protein, 10 aa, Homo sapiens
  misc_feature (1)..(10): Table A2; Target 3562; MAGEA10; ENSG00000124260; HLA-B*54:01;
FPSSFPSSSS

SEQ ID NO: 106405 - protein, 10 aa, Homo sapiens
  misc_feature (1)..(10): Table A2; Target 3563; MAGEA10; ENSG00000124260; HLA-B*56:01;
FPSSFPSSSS

SEQ ID NO: 106406 - protein, 9 aa, Homo sapiens
  misc_feature (1)..(9): Table A2; Target 3564; MAGEA10; ENSG00000124260; HLA-B*54:01;
FPSSFPSSS

SEQ ID NO: 106407 - protein, 9 aa, Homo sapiens
  misc_feature (1)..(9): Table A2; Target 3565; MAGEA10; ENSG00000124260; HLA-B*56:01;
FPSSFPSSS

SEQ ID NO: 106408 - protein, 8 aa, Homo sapiens
  misc_feature (1)..(8): Table A2; Target 3566; MAGEA10; ENSG00000124260; HLA-B*54:01;
FPSSFPSS

SEQ ID NO: 106409 - protein, 9 aa, Homo sapiens
  misc_feature (1)..(9): Table A2; Target 3567; MAGEA10; ENSG00000124260; HLA-B*39:01;
FPSSSSSSS

SEQ ID NO: 106410 - protein, 9 aa, Homo sapiens
  misc_feature (1)..(9): Table A2; Target 3568; MAGEA10; ENSG00000124260; HLA-C*03:03;
FSEASECML

SEQ ID NO: 106411 - protein, 9 aa, Homo sapiens
  misc_feature (1)..(9): Table A2; Target 3569; MAGEA10; ENSG00000124260; HLA-C*03:04;
FSEASECML

SEQ ID NO: 106412 - protein, 9 aa, Homo sapiens
  misc_feature (1)..(9): Table A2; Target 3570; MAGEA10; ENSG00000124260; HLA-C*05:01;
FSEASECML

SEQ ID NO: 106413 - protein, 11 aa, Homo sapiens
  misc_feature (1)..(11): Table A2; Target 3571; MAGEA10; ENSG00000124260; HLA-A*29:02;
FVLVTSLGLTY

SEQ ID NO: 106414 - protein, 10 aa, Homo sapiens
  misc_feature (1)..(10): Table A2; Target 3572; MAGEA10; ENSG00000124260; HLA-B*38:01;
GHSFVLVTSL

SEQ ID NO: 106415 - protein, 11 aa, Homo sapiens
  misc_feature (1)..(11): Table A2; Target 3573; MAGEA10; ENSG00000124260; HLA-A*01:01;
GLYDGMEHLIY

SEQ ID NO: 106416 - protein, 11 aa, Homo sapiens
  misc_feature (1)..(11): Table A2; Target 3574; MAGEA10; ENSG00000124260; HLA-A*03:01;
GLYDGMEHLIY

SEQ ID NO: 106417 - protein, 11 aa, Homo sapiens
  misc_feature (1)..(11): Table A2; Target 3575; MAGEA10; ENSG00000124260; HLA-A*29:02;
GLYDGMEHLIY

SEQ ID NO: 106418 - protein, 10 aa, Homo sapiens
  misc_feature (1)..(10): Table A2; Target 3576; MAGEA10; ENSG00000124260; HLA-A*02:01;
GLYDGMEHLI

SEQ ID NO: 106419 - protein, 10 aa, Homo sapiens
  misc_feature (1)..(10): Table A2; Target 3577; MAGEA10; ENSG00000124260; HLA-A*02:03;
GLYDGMEHLI

SEQ ID NO: 106420 - protein, 10 aa, Homo sapiens
  misc_feature (1)..(10): Table A2; Target 3578; MAGEA10; ENSG00000124260; HLA-A*02:04;
GLYDGMEHLI

SEQ ID NO: 106421 - protein, 10 aa, Homo sapiens
  misc_feature (1)..(10): Table A2; Target 3579; MAGEA10; ENSG00000124260; HLA-A*02:07;
GLYDGMEHLI

SEQ ID NO: 106422 - protein, 10 aa, Homo sapiens
  misc_feature (1)..(10): Table A2; Target 3580; MAGEA10; ENSG00000124260; HLA-A*03:01;
GLYDGMEHLI

SEQ ID NO: 106423 - protein, 10 aa, Homo sapiens
  misc_feature (1)..(10): Table A2; Target 3581; MAGEA10; ENSG00000124260; HLA-A*30:01;
GLYDGMEHLI

SEQ ID NO: 106424 - protein, 10 aa, Homo sapiens
  misc_feature (1)..(10): Table A2; Target 3582; MAGEA10; ENSG00000124260; HLA-B*13:02;
GLYDGMEHLI

SEQ ID NO: 106425 - protein, 10 aa, Homo sapiens
  misc_feature (1)..(10): Table A2; Target 3583; MAGEA10; ENSG00000124260; HLA-B*55:01;
GLYDGMEHLI

SEQ ID NO: 106426 - protein, 10 aa, Homo sapiens
  misc_feature (1)..(10): Table A2; Target 3584; MAGEA10; ENSG00000124260; HLA-C*06:02;
GLYDGMEHLI

SEQ ID NO: 106427 - protein, 9 aa, Homo sapiens
  misc_feature (1)..(9): Table A2; Target 3585; MAGEA10; ENSG00000124260; HLA-A*02:01;
GLYDGMEHL

SEQ ID NO: 106428 - protein, 9 aa, Homo sapiens
  misc_feature (1)..(9): Table A2; Target 3586; MAGEA10; ENSG00000124260; HLA-A*02:03;
GLYDGMEHL

SEQ ID NO: 106429 - protein, 9 aa, Homo sapiens
  misc_feature (1)..(9): Table A2; Target 3587; MAGEA10; ENSG00000124260; HLA-A*02:04;
GLYDGMEHL

SEQ ID NO: 106430 - protein, 9 aa, Homo sapiens
  misc_feature (1)..(9): Table A2; Target 3588; MAGEA10; ENSG00000124260; HLA-A*02:07;
GLYDGMEHL

SEQ ID NO: 106431 - protein, 9 aa, Homo sapiens
  misc_feature (1)..(9): Table A2; Target 3589; MAGEA10; ENSG00000124260; HLA-A*03:01;
GLYDGMEHL

SEQ ID NO: 106432 - protein, 9 aa, Homo sapiens
  misc_feature (1)..(9): Table A2; Target 3590; MAGEA10; ENSG00000124260; HLA-A*30:01;
GLYDGMEHL

SEQ ID NO: 106433 - protein, 9 aa, Homo sapiens
  misc_feature (1)..(9): Table A2; Target 3591; MAGEA10; ENSG00000124260; HLA-A*68:02;
GLYDGMEHL

SEQ ID NO: 106434 - protein, 9 aa, Homo sapiens
  misc_feature (1)..(9): Table A2; Target 3592; MAGEA10; ENSG00000124260; HLA-B*13:02;
GLYDGMEHL

SEQ ID NO: 106435 - protein, 9 aa, Homo sapiens
  misc_feature (1)..(9): Table A2; Target 3593; MAGEA10; ENSG00000124260; HLA-B*15:01;
GLYDGMEHL

SEQ ID NO: 106436 - protein, 9 aa, Homo sapiens
  misc_feature (1)..(9): Table A2; Target 3594; MAGEA10; ENSG00000124260; HLA-B*15:03;
GLYDGMEHL

SEQ ID NO: 106437 - protein, 9 aa, Homo sapiens
  misc_feature (1)..(9): Table A2; Target 3595; MAGEA10; ENSG00000124260; HLA-B*40:01;
GLYDGMEHL

SEQ ID NO: 106438 - protein, 9 aa, Homo sapiens
  misc_feature (1)..(9): Table A2; Target 3596; MAGEA10; ENSG00000124260; HLA-B*46:01;
GLYDGMEHL

SEQ ID NO: 106439 - protein, 9 aa, Homo sapiens
  misc_feature (1)..(9): Table A2; Target 3597; MAGEA10; ENSG00000124260; HLA-B*55:01;
GLYDGMEHL

SEQ ID NO: 106440 - protein, 9 aa, Homo sapiens
  misc_feature (1)..(9): Table A2; Target 3598; MAGEA10; ENSG00000124260; HLA-C*02:02;
GLYDGMEHL

SEQ ID NO: 106441 - protein, 11 aa, Homo sapiens
  misc_feature (1)..(11): Table A2; Target 3599; MAGEA10; ENSG00000124260; HLA-A*03:01;
GMLSDVQSMPK

SEQ ID NO: 106442 - protein, 11 aa, Homo sapiens
  misc_feature (1)..(11): Table A2; Target 3600; MAGEA10; ENSG00000124260; HLA-A*03:02;
GMLSDVQSMPK

SEQ ID NO: 106443 - protein, 11 aa, Homo sapiens
  misc_feature (1)..(11): Table A2; Target 3601; MAGEA10; ENSG00000124260; HLA-A*11:01;
GMLSDVQSMPK

SEQ ID NO: 106444 - protein, 11 aa, Homo sapiens
  misc_feature (1)..(11): Table A2; Target 3602; MAGEA10; ENSG00000124260; HLA-B*27:05;
GMLSDVQSMPK

SEQ ID NO: 106445 - protein, 9 aa, Homo sapiens
  misc_feature (1)..(9): Table A2; Target 3603; MAGEA10; ENSG00000124260; HLA-A*02:01;
GMLSDVQSM

SEQ ID NO: 106446 - protein, 9 aa, Homo sapiens
  misc_feature (1)..(9): Table A2; Target 3604; MAGEA10; ENSG00000124260; HLA-A*02:04;
GMLSDVQSM

SEQ ID NO: 106447 - protein, 9 aa, Homo sapiens
  misc_feature (1)..(9): Table A2; Target 3605; MAGEA10; ENSG00000124260; HLA-A*23:01;
GMLSDVQSM

SEQ ID NO: 106448 - protein, 9 aa, Homo sapiens
  misc_feature (1)..(9): Table A2; Target 3606; MAGEA10; ENSG00000124260; HLA-A*32:01;
GMLSDVQSM

SEQ ID NO: 106449 - protein, 9 aa, Homo sapiens
  misc_feature (1)..(9): Table A2; Target 3607; MAGEA10; ENSG00000124260; HLA-B*13:02;
GMLSDVQSM

SEQ ID NO: 106450 - protein, 9 aa, Homo sapiens
  misc_feature (1)..(9): Table A2; Target 3608; MAGEA10; ENSG00000124260; HLA-B*15:01;
GMLSDVQSM

SEQ ID NO: 106451 - protein, 9 aa, Homo sapiens
  misc_feature (1)..(9): Table A2; Target 3609; MAGEA10; ENSG00000124260; HLA-B*15:03;
GMLSDVQSM

SEQ ID NO: 106452 - protein, 9 aa, Homo sapiens
  misc_feature (1)..(9): Table A2; Target 3610; MAGEA10; ENSG00000124260; HLA-B*27:05;
GMLSDVQSM

SEQ ID NO: 106453 - protein, 9 aa, Homo sapiens
  misc_feature (1)..(9): Table A2; Target 3611; MAGEA10; ENSG00000124260; HLA-B*37:01;
GMLSDVQSM

SEQ ID NO: 106454 - protein, 9 aa, Homo sapiens
  misc_feature (1)..(9): Table A2; Target 3612; MAGEA10; ENSG00000124260; HLA-B*46:01;
GMLSDVQSM

SEQ ID NO: 106455 - protein, 9 aa, Homo sapiens
  misc_feature (1)..(9): Table A2; Target 3613; MAGEA10; ENSG00000124260; HLA-B*55:01;
GMLSDVQSM

SEQ ID NO: 106456 - protein, 9 aa, Homo sapiens
  misc_feature (1)..(9): Table A2; Target 3614; MAGEA10; ENSG00000124260; HLA-B*58:01;
GMLSDVQSM

SEQ ID NO: 106457 - protein, 9 aa, Homo sapiens
  misc_feature (1)..(9): Table A2; Target 3615; MAGEA10; ENSG00000124260; HLA-C*01:02;
GMLSDVQSM

SEQ ID NO: 106458 - protein, 9 aa, Homo sapiens
  misc_feature (1)..(9): Table A2; Target 3616; MAGEA10; ENSG00000124260; HLA-C*07:04;
GMLSDVQSM

SEQ ID NO: 106459 - protein, 9 aa, Homo sapiens
  misc_feature (1)..(9): Table A2; Target 3617; MAGEA10; ENSG00000124260; HLA-C*14:02;
GMLSDVQSM

SEQ ID NO: 106460 - protein, 8 aa, Homo sapiens
  misc_feature (1)..(8): Table A2; Target 3618; MAGEA10; ENSG00000124260; HLA-B*07:02;
GPRAHAEI

SEQ ID NO: 106461 - protein, 8 aa, Homo sapiens
  misc_feature (1)..(8): Table A2; Target 3619; MAGEA10; ENSG00000124260; HLA-C*07:02;
GPRAHAEI

SEQ ID NO: 106462 - protein, 11 aa, Homo sapiens
  misc_feature (1)..(11): Table A2; Target 3620; MAGEA10; ENSG00000124260; HLA-B*57:01;
GSDPARYEFLW

SEQ ID NO: 106463 - protein, 9 aa, Homo sapiens
  misc_feature (1)..(9): Table A2; Target 3621; MAGEA10; ENSG00000124260; HLA-A*01:01;
GSDPARYEF

SEQ ID NO: 106464 - protein, 9 aa, Homo sapiens
  misc_feature (1)..(9): Table A2; Target 3622; MAGEA10; ENSG00000124260; HLA-A*30:02;
GSDPARYEF

SEQ ID NO: 106465 - protein, 9 aa, Homo sapiens
  misc_feature (1)..(9): Table A2; Target 3623; MAGEA10; ENSG00000124260; HLA-A*32:01;
GSDPARYEF

SEQ ID NO: 106466 - protein, 9 aa, Homo sapiens
  misc_feature (1)..(9): Table A2; Target 3624; MAGEA10; ENSG00000124260; HLA-B*15:01;
GSDPARYEF

SEQ ID NO: 106467 - protein, 9 aa, Homo sapiens
  misc_feature (1)..(9): Table A2; Target 3625; MAGEA10; ENSG00000124260; HLA-B*38:01;
GSDPARYEF

SEQ ID NO: 106468 - protein, 9 aa, Homo sapiens
  misc_feature (1)..(9): Table A2; Target 3626; MAGEA10; ENSG00000124260; HLA-B*57:01;
GSDPARYEF

SEQ ID NO: 106469 - protein, 9 aa, Homo sapiens
  misc_feature (1)..(9): Table A2; Target 3627; MAGEA10; ENSG00000124260; HLA-B*58:01;
GSDPARYEF

SEQ ID NO: 106470 - protein, 9 aa, Homo sapiens
  misc_feature (1)..(9): Table A2; Target 3628; MAGEA10; ENSG00000124260; HLA-C*02:02;
GSDPARYEF

SEQ ID NO: 106471 - protein, 9 aa, Homo sapiens
  misc_feature (1)..(9): Table A2; Target 3629; MAGEA10; ENSG00000124260; HLA-C*03:04;
GSDPARYEF

SEQ ID NO: 106472 - protein, 9 aa, Homo sapiens
  misc_feature (1)..(9): Table A2; Target 3630; MAGEA10; ENSG00000124260; HLA-C*05:01;
GSDPARYEF

SEQ ID NO: 106473 - protein, 9 aa, Homo sapiens
  misc_feature (1)..(9): Table A2; Target 3631; MAGEA10; ENSG00000124260; HLA-C*16:01;
GSDPARYEF

SEQ ID NO: 106474 - protein, 9 aa, Homo sapiens
  misc_feature (1)..(9): Table A2; Target 3632; MAGEA10; ENSG00000124260; HLA-C*16:04;
GSDPARYEF

SEQ ID NO: 106475 - protein, 11 aa, Homo sapiens
  misc_feature (1)..(11): Table A2; Target 3633; MAGEA10; ENSG00000124260; HLA-A*01:01;
GSDPRSFPLWY

SEQ ID NO: 106476 - protein, 10 aa, Homo sapiens
  misc_feature (1)..(10): Table A2; Target 3634; MAGEA10; ENSG00000124260; HLA-B*57:01;
GSDPRSFPLW

SEQ ID NO: 106477 - protein, 9 aa, Homo sapiens
  misc_feature (1)..(9): Table A2; Target 3635; MAGEA10; ENSG00000124260; HLA-A*01:01;
GSDPRSFPL

SEQ ID NO: 106478 - protein, 9 aa, Homo sapiens
  misc_feature (1)..(9): Table A2; Target 3636; MAGEA10; ENSG00000124260; HLA-C*03:04;
GSDPRSFPL

SEQ ID NO: 106479 - protein, 9 aa, Homo sapiens
  misc_feature (1)..(9): Table A2; Target 3637; MAGEA10; ENSG00000124260; HLA-C*05:01;
GSDPRSFPL

SEQ ID NO: 106480 - protein, 9 aa, Homo sapiens
  misc_feature (1)..(9): Table A2; Target 3638; MAGEA10; ENSG00000124260; HLA-B*08:01;
HAEIRKMSL

SEQ ID NO: 106481 - protein, 9 aa, Homo sapiens
  misc_feature (1)..(9): Table A2; Target 3639; MAGEA10; ENSG00000124260; HLA-A*68:02;
HSFVLVTSL

SEQ ID NO: 106482 - protein, 9 aa, Homo sapiens
  misc_feature (1)..(9): Table A2; Target 3640; MAGEA10; ENSG00000124260; HLA-B*08:01;
HSFVLVTSL

SEQ ID NO: 106483 - protein, 9 aa, Homo sapiens
  misc_feature (1)..(9): Table A2; Target 3641; MAGEA10; ENSG00000124260; HLA-B*15:03;
HSFVLVTSL

SEQ ID NO: 106484 - protein, 9 aa, Homo sapiens
  misc_feature (1)..(9): Table A2; Target 3642; MAGEA10; ENSG00000124260; HLA-B*18:01;
HSFVLVTSL

SEQ ID NO: 106485 - protein, 9 aa, Homo sapiens
  misc_feature (1)..(9): Table A2; Target 3643; MAGEA10; ENSG00000124260; HLA-B*35:01;
HSFVLVTSL

SEQ ID NO: 106486 - protein, 9 aa, Homo sapiens
  misc_feature (1)..(9): Table A2; Target 3644; MAGEA10; ENSG00000124260; HLA-B*40:01;
HSFVLVTSL

SEQ ID NO: 106487 - protein, 9 aa, Homo sapiens
  misc_feature (1)..(9): Table A2; Target 3645; MAGEA10; ENSG00000124260; HLA-B*40:02;
HSFVLVTSL

SEQ ID NO: 106488 - protein, 9 aa, Homo sapiens
  misc_feature (1)..(9): Table A2; Target 3646; MAGEA10; ENSG00000124260; HLA-B*46:01;
HSFVLVTSL

SEQ ID NO: 106489 - protein, 9 aa, Homo sapiens
  misc_feature (1)..(9): Table A2; Target 3647; MAGEA10; ENSG00000124260; HLA-B*58:01;
HSFVLVTSL

SEQ ID NO: 106490 - protein, 9 aa, Homo sapiens
  misc_feature (1)..(9): Table A2; Target 3648; MAGEA10; ENSG00000124260; HLA-C*02:02;
HSFVLVTSL

SEQ ID NO: 106491 - protein, 9 aa, Homo sapiens
  misc_feature (1)..(9): Table A2; Target 3649; MAGEA10; ENSG00000124260; HLA-C*03:03;
HSFVLVTSL

SEQ ID NO: 106492 - protein, 9 aa, Homo sapiens
  misc_feature (1)..(9): Table A2; Target 3650; MAGEA10; ENSG00000124260; HLA-C*03:04;
HSFVLVTSL

SEQ ID NO: 106493 - protein, 9 aa, Homo sapiens
  misc_feature (1)..(9): Table A2; Target 3651; MAGEA10; ENSG00000124260; HLA-C*12:03;
HSFVLVTSL

SEQ ID NO: 106494 - protein, 9 aa, Homo sapiens
  misc_feature (1)..(9): Table A2; Target 3652; MAGEA10; ENSG00000124260; HLA-B*51:01;
IACSSPSVV

SEQ ID NO: 106495 - protein, 9 aa, Homo sapiens
  misc_feature (1)..(9): Table A2; Target 3653; MAGEA10; ENSG00000124260; HLA-C*12:03;
IACSSPSVV

SEQ ID NO: 106496 - protein, 8 aa, Homo sapiens
  misc_feature (1)..(8): Table A2; Target 3654; MAGEA10; ENSG00000124260; HLA-B*51:01;
IACSSPSV

SEQ ID NO: 106497 - protein, 10 aa, Homo sapiens
  misc_feature (1)..(10): Table A2; Target 3655; MAGEA10; ENSG00000124260; HLA-B*35:01;
IATTDDTTAM

SEQ ID NO: 106498 - protein, 10 aa, Homo sapiens
  misc_feature (1)..(10): Table A2; Target 3656; MAGEA10; ENSG00000124260; HLA-B*35:03;
IATTDDTTAM

SEQ ID NO: 106499 - protein, 10 aa, Homo sapiens
  misc_feature (1)..(10): Table A2; Target 3657; MAGEA10; ENSG00000124260; HLA-B*39:01;
IATTDDTTAM

SEQ ID NO: 106500 - protein, 10 aa, Homo sapiens
  misc_feature (1)..(10): Table A2; Target 3658; MAGEA10; ENSG00000124260; HLA-B*55:01;
IATTDDTTAM

SEQ ID NO: 106501 - protein, 10 aa, Homo sapiens
  misc_feature (1)..(10): Table A2; Target 3659; MAGEA10; ENSG00000124260; HLA-C*03:03;
IATTDDTTAM

SEQ ID NO: 106502 - protein, 10 aa, Homo sapiens
  misc_feature (1)..(10): Table A2; Target 3660; MAGEA10; ENSG00000124260; HLA-C*03:04;
IATTDDTTAM

SEQ ID NO: 106503 - protein, 10 aa, Homo sapiens
  misc_feature (1)..(10): Table A2; Target 3661; MAGEA10; ENSG00000124260; HLA-C*05:01;
IATTDDTTAM

SEQ ID NO: 106504 - protein, 9 aa, Homo sapiens
  misc_feature (1)..(9): Table A2; Target 3662; MAGEA10; ENSG00000124260; HLA-B*35:03;
IATTDDTTA

SEQ ID NO: 106505 - protein, 8 aa, Homo sapiens
  misc_feature (1)..(8): Table A2; Target 3663; MAGEA10; ENSG00000124260; HLA-B*37:01;
IDEKVTDL

SEQ ID NO: 106506 - protein, 9 aa, Homo sapiens
  misc_feature (1)..(9): Table A2; Target 3664; MAGEA10; ENSG00000124260; HLA-A*01:01;
ILESVIRNY

SEQ ID NO: 106507 - protein, 9 aa, Homo sapiens
  misc_feature (1)..(9): Table A2; Target 3665; MAGEA10; ENSG00000124260; HLA-A*02:07;
ILESVIRNY

SEQ ID NO: 106508 - protein, 9 aa, Homo sapiens
  misc_feature (1)..(9): Table A2; Target 3666; MAGEA10; ENSG00000124260; HLA-A*03:01;
ILESVIRNY

SEQ ID NO: 106509 - protein, 9 aa, Homo sapiens
  misc_feature (1)..(9): Table A2; Target 3667; MAGEA10; ENSG00000124260; HLA-A*03:02;
ILESVIRNY

SEQ ID NO: 106510 - protein, 9 aa, Homo sapiens
  misc_feature (1)..(9): Table A2; Target 3668; MAGEA10; ENSG00000124260; HLA-A*29:02;
ILESVIRNY

SEQ ID NO: 106511 - protein, 9 aa, Homo sapiens
  misc_feature (1)..(9): Table A2; Target 3669; MAGEA10; ENSG00000124260; HLA-A*30:02;
ILESVIRNY

SEQ ID NO: 106512 - protein, 9 aa, Homo sapiens
  misc_feature (1)..(9): Table A2; Target 3670; MAGEA10; ENSG00000124260; HLA-A*32:01;
ILESVIRNY

SEQ ID NO: 106513 - protein, 9 aa, Homo sapiens
  misc_feature (1)..(9): Table A2; Target 3671; MAGEA10; ENSG00000124260; HLA-B*15:01;
ILESVIRNY

SEQ ID NO: 106514 - protein, 9 aa, Homo sapiens
  misc_feature (1)..(9): Table A2; Target 3672; MAGEA10; ENSG00000124260; HLA-B*15:03;
ILESVIRNY

SEQ ID NO: 106515 - protein, 9 aa, Homo sapiens
  misc_feature (1)..(9): Table A2; Target 3673; MAGEA10; ENSG00000124260; HLA-B*44:02;
ILESVIRNY

SEQ ID NO: 106516 - protein, 9 aa, Homo sapiens
  misc_feature (1)..(9): Table A2; Target 3674; MAGEA10; ENSG00000124260; HLA-B*44:03;
ILESVIRNY

SEQ ID NO: 106517 - protein, 9 aa, Homo sapiens
  misc_feature (1)..(9): Table A2; Target 3675; MAGEA10; ENSG00000124260; HLA-B*46:01;
ILESVIRNY

SEQ ID NO: 106518 - protein, 9 aa, Homo sapiens
  misc_feature (1)..(9): Table A2; Target 3676; MAGEA10; ENSG00000124260; HLA-B*57:01;
ILESVIRNY

SEQ ID NO: 106519 - protein, 9 aa, Homo sapiens
  misc_feature (1)..(9): Table A2; Target 3677; MAGEA10; ENSG00000124260; HLA-B*58:01;
ILESVIRNY

SEQ ID NO: 106520 - protein, 9 aa, Homo sapiens
  misc_feature (1)..(9): Table A2; Target 3678; MAGEA10; ENSG00000124260; HLA-C*02:02;
ILESVIRNY

SEQ ID NO: 106521 - protein, 9 aa, Homo sapiens
  misc_feature (1)..(9): Table A2; Target 3679; MAGEA10; ENSG00000124260; HLA-C*07:04;
ILESVIRNY

SEQ ID NO: 106522 - protein, 9 aa, Homo sapiens
  misc_feature (1)..(9): Table A2; Target 3680; MAGEA10; ENSG00000124260; HLA-C*16:01;
ILESVIRNY

SEQ ID NO: 106523 - protein, 9 aa, Homo sapiens
  misc_feature (1)..(9): Table A2; Target 3681; MAGEA10; ENSG00000124260; HLA-C*16:02;
ILESVIRNY

SEQ ID NO: 106524 - protein, 9 aa, Homo sapiens
  misc_feature (1)..(9): Table A2; Target 3682; MAGEA10; ENSG00000124260; HLA-A*02:01;
ILILSIVFI

SEQ ID NO: 106525 - protein, 9 aa, Homo sapiens
  misc_feature (1)..(9): Table A2; Target 3683; MAGEA10; ENSG00000124260; HLA-A*02:04;
ILILSIVFI

SEQ ID NO: 106526 - protein, 10 aa, Homo sapiens
  misc_feature (1)..(10): Table A2; Target 3684; MAGEA10; ENSG00000124260; HLA-A*01:01;
ILSIVFIEGY

SEQ ID NO: 106527 - protein, 10 aa, Homo sapiens
  misc_feature (1)..(10): Table A2; Target 3685; MAGEA10; ENSG00000124260; HLA-B*35:03;
IPSTPEEVSA

SEQ ID NO: 106528 - protein, 10 aa, Homo sapiens
  misc_feature (1)..(10): Table A2; Target 3686; MAGEA10; ENSG00000124260; HLA-B*54:01;
IPSTPEEVSA

SEQ ID NO: 106529 - protein, 10 aa, Homo sapiens
  misc_feature (1)..(10): Table A2; Target 3687; MAGEA10; ENSG00000124260; HLA-B*55:01;
IPSTPEEVSA

SEQ ID NO: 106530 - protein, 10 aa, Homo sapiens
  misc_feature (1)..(10): Table A2; Target 3688; MAGEA10; ENSG00000124260; HLA-B*56:01;
IPSTPEEVSA

SEQ ID NO: 106531 - protein, 9 aa, Homo sapiens
  misc_feature (1)..(9): Table A2; Target 3689; MAGEA10; ENSG00000124260; HLA-A*24:02;
IYGEPRKLL

SEQ ID NO: 106532 - protein, 8 aa, Homo sapiens
  misc_feature (1)..(8): Table A2; Target 3690; MAGEA10; ENSG00000124260; HLA-A*23:01;
IYGEPRKL

SEQ ID NO: 106533 - protein, 8 aa, Homo sapiens
  misc_feature (1)..(8): Table A2; Target 3691; MAGEA10; ENSG00000124260; HLA-A*24:02;
IYGEPRKL

SEQ ID NO: 106534 - protein, 8 aa, Homo sapiens
  misc_feature (1)..(8): Table A2; Target 3692; MAGEA10; ENSG00000124260; HLA-C*06:02;
IYGEPRKL

SEQ ID NO: 106535 - protein, 8 aa, Homo sapiens
  misc_feature (1)..(8): Table A2; Target 3693; MAGEA10; ENSG00000124260; HLA-C*16:01;
IYGEPRKL

SEQ ID NO: 106536 - protein, 11 aa, Homo sapiens
  misc_feature (1)..(11): Table A2; Target 3694; MAGEA10; ENSG00000124260; HLA-A*30:01;
KEESPSTLQVL

SEQ ID NO: 106537 - protein, 11 aa, Homo sapiens
  misc_feature (1)..(11): Table A2; Target 3695; MAGEA10; ENSG00000124260; HLA-B*40:01;
KEESPSTLQVL

SEQ ID NO: 106538 - protein, 11 aa, Homo sapiens
  misc_feature (1)..(11): Table A2; Target 3696; MAGEA10; ENSG00000124260; HLA-B*40:02;
KEESPSTLQVL

SEQ ID NO: 106539 - protein, 11 aa, Homo sapiens
  misc_feature (1)..(11): Table A2; Target 3697; MAGEA10; ENSG00000124260; HLA-B*44:03;
KEESPSTLQVL

SEQ ID NO: 106540 - protein, 11 aa, Homo sapiens
  misc_feature (1)..(11): Table A2; Target 3698; MAGEA10; ENSG00000124260; HLA-B*49:01;
KEESPSTLQVL

SEQ ID NO: 106541 - protein, 10 aa, Homo sapiens
  misc_feature (1)..(10): Table A2; Target 3699; MAGEA10; ENSG00000124260; HLA-B*40:01;
KEESPSTLQV

SEQ ID NO: 106542 - protein, 10 aa, Homo sapiens
  misc_feature (1)..(10): Table A2; Target 3700; MAGEA10; ENSG00000124260; HLA-B*49:01;
KEESPSTLQV

SEQ ID NO: 106543 - protein, 8 aa, Homo sapiens
  misc_feature (1)..(8): Table A2; Target 3701; MAGEA10; ENSG00000124260; HLA-B*40:01;
KEESPSTL

SEQ ID NO: 106544 - protein, 10 aa, Homo sapiens
  misc_feature (1)..(10): Table A2; Target 3702; MAGEA10; ENSG00000124260; HLA-B*40:01;
KEPITKAEIL

SEQ ID NO: 106545 - protein, 9 aa, Homo sapiens
  misc_feature (1)..(9): Table A2; Target 3703; MAGEA10; ENSG00000124260; HLA-B*37:01;
KEPITKAEI

SEQ ID NO: 106546 - protein, 9 aa, Homo sapiens
  misc_feature (1)..(9): Table A2; Target 3704; MAGEA10; ENSG00000124260; HLA-B*40:01;
KEPITKAEI

SEQ ID NO: 106547 - protein, 9 aa, Homo sapiens
  misc_feature (1)..(9): Table A2; Target 3705; MAGEA10; ENSG00000124260; HLA-B*49:01;
KEPITKAEI

SEQ ID NO: 106548 - protein, 11 aa, Homo sapiens
  misc_feature (1)..(11): Table A2; Target 3706; MAGEA10; ENSG00000124260; HLA-B*49:01;
KEVDPTGHSFV

SEQ ID NO: 106549 - protein, 10 aa, Homo sapiens
  misc_feature (1)..(10): Table A2; Target 3707; MAGEA10; ENSG00000124260; HLA-A*23:01;
KEVDPTGHSF

SEQ ID NO: 106550 - protein, 10 aa, Homo sapiens
  misc_feature (1)..(10): Table A2; Target 3708; MAGEA10; ENSG00000124260; HLA-A*24:02;
KEVDPTGHSF

SEQ ID NO: 106551 - protein, 10 aa, Homo sapiens
  misc_feature (1)..(10): Table A2; Target 3709; MAGEA10; ENSG00000124260; HLA-A*25:01;
KEVDPTGHSF

SEQ ID NO: 106552 - protein, 10 aa, Homo sapiens
  misc_feature (1)..(10): Table A2; Target 3710; MAGEA10; ENSG00000124260; HLA-A*30:01;
KEVDPTGHSF

SEQ ID NO: 106553 - protein, 10 aa, Homo sapiens
  misc_feature (1)..(10): Table A2; Target 3711; MAGEA10; ENSG00000124260; HLA-A*30:02;
KEVDPTGHSF

SEQ ID NO: 106554 - protein, 10 aa, Homo sapiens
  misc_feature (1)..(10): Table A2; Target 3712; MAGEA10; ENSG00000124260; HLA-A*32:01;
KEVDPTGHSF

SEQ ID NO: 106555 - protein, 10 aa, Homo sapiens
  misc_feature (1)..(10): Table A2; Target 3713; MAGEA10; ENSG00000124260; HLA-B*15:01;
KEVDPTGHSF

SEQ ID NO: 106556 - protein, 10 aa, Homo sapiens
  misc_feature (1)..(10): Table A2; Target 3714; MAGEA10; ENSG00000124260; HLA-B*15:03;
KEVDPTGHSF

SEQ ID NO: 106557 - protein, 10 aa, Homo sapiens
  misc_feature (1)..(10): Table A2; Target 3715; MAGEA10; ENSG00000124260; HLA-B*18:01;
KEVDPTGHSF

SEQ ID NO: 106558 - protein, 10 aa, Homo sapiens
  misc_feature (1)..(10): Table A2; Target 3716; MAGEA10; ENSG00000124260; HLA-B*27:02;
KEVDPTGHSF

SEQ ID NO: 106559 - protein, 10 aa, Homo sapiens
  misc_feature (1)..(10): Table A2; Target 3717; MAGEA10; ENSG00000124260; HLA-B*27:05;
KEVDPTGHSF

SEQ ID NO: 106560 - protein, 10 aa, Homo sapiens
  misc_feature (1)..(10): Table A2; Target 3718; MAGEA10; ENSG00000124260; HLA-B*37:01;
KEVDPTGHSF

SEQ ID NO: 106561 - protein, 10 aa, Homo sapiens
  misc_feature (1)..(10): Table A2; Target 3719; MAGEA10; ENSG00000124260; HLA-B*38:01;
KEVDPTGHSF

SEQ ID NO: 106562 - protein, 10 aa, Homo sapiens
  misc_feature (1)..(10): Table A2; Target 3720; MAGEA10; ENSG00000124260; HLA-B*40:01;
KEVDPTGHSF

SEQ ID NO: 106563 - protein, 10 aa, Homo sapiens
  misc_feature (1)..(10): Table A2; Target 3721; MAGEA10; ENSG00000124260; HLA-B*40:02;
KEVDPTGHSF

SEQ ID NO: 106564 - protein, 10 aa, Homo sapiens
  misc_feature (1)..(10): Table A2; Target 3722; MAGEA10; ENSG00000124260; HLA-B*44:02;
KEVDPTGHSF

SEQ ID NO: 106565 - protein, 10 aa, Homo sapiens
  misc_feature (1)..(10): Table A2; Target 3723; MAGEA10; ENSG00000124260; HLA-B*44:03;
KEVDPTGHSF

SEQ ID NO: 106566 - protein, 10 aa, Homo sapiens
  misc_feature (1)..(10): Table A2; Target 3724; MAGEA10; ENSG00000124260; HLA-B*49:01;
KEVDPTGHSF

SEQ ID NO: 106567 - protein, 10 aa, Homo sapiens
  misc_feature (1)..(10): Table A2; Target 3725; MAGEA10; ENSG00000124260; HLA-B*57:01;
KEVDPTGHSF

SEQ ID NO: 106568 - protein, 10 aa, Homo sapiens
  misc_feature (1)..(10): Table A2; Target 3726; MAGEA10; ENSG00000124260; HLA-B*58:01;
KEVDPTGHSF

SEQ ID NO: 106569 - protein, 10 aa, Homo sapiens
  misc_feature (1)..(10): Table A2; Target 3727; MAGEA10; ENSG00000124260; HLA-C*02:02;
KEVDPTGHSF

SEQ ID NO: 106570 - protein, 10 aa, Homo sapiens
  misc_feature (1)..(10): Table A2; Target 3728; MAGEA10; ENSG00000124260; HLA-C*03:04;
KEVDPTGHSF

SEQ ID NO: 106571 - protein, 10 aa, Homo sapiens
  misc_feature (1)..(10): Table A2; Target 3729; MAGEA10; ENSG00000124260; HLA-C*16:01;
KEVDPTGHSF

SEQ ID NO: 106572 - protein, 10 aa, Homo sapiens
  misc_feature (1)..(10): Table A2; Target 3730; MAGEA10; ENSG00000124260; HLA-C*16:04;
KEVDPTGHSF

SEQ ID NO: 106573 - protein, 10 aa, Homo sapiens
  misc_feature (1)..(10): Table A2; Target 3731; MAGEA10; ENSG00000124260; HLA-A*03:02;
KVNGSDPRSF

SEQ ID NO: 106574 - protein, 10 aa, Homo sapiens
  misc_feature (1)..(10): Table A2; Target 3732; MAGEA10; ENSG00000124260; HLA-A*25:01;
KVNGSDPRSF

SEQ ID NO: 106575 - protein, 10 aa, Homo sapiens
  misc_feature (1)..(10): Table A2; Target 3733; MAGEA10; ENSG00000124260; HLA-A*30:02;
KVNGSDPRSF

SEQ ID NO: 106576 - protein, 10 aa, Homo sapiens
  misc_feature (1)..(10): Table A2; Target 3734; MAGEA10; ENSG00000124260; HLA-A*32:01;
KVNGSDPRSF

SEQ ID NO: 106577 - protein, 10 aa, Homo sapiens
  misc_feature (1)..(10): Table A2; Target 3735; MAGEA10; ENSG00000124260; HLA-B*57:01;
KVNGSDPRSF

SEQ ID NO: 106578 - protein, 10 aa, Homo sapiens
  misc_feature (1)..(10): Table A2; Target 3736; MAGEA10; ENSG00000124260; HLA-B*58:01;
KVNGSDPRSF

SEQ ID NO: 106579 - protein, 10 aa, Homo sapiens
  misc_feature (1)..(10): Table A2; Target 3737; MAGEA10; ENSG00000124260; HLA-A*02:04;
KVTDLVQFLL

SEQ ID NO: 106580 - protein, 9 aa, Homo sapiens
  misc_feature (1)..(9): Table A2; Target 3738; MAGEA10; ENSG00000124260; HLA-A*02:01;
KVTDLVQFL

SEQ ID NO: 106581 - protein, 9 aa, Homo sapiens
  misc_feature (1)..(9): Table A2; Target 3739; MAGEA10; ENSG00000124260; HLA-A*02:03;
KVTDLVQFL

SEQ ID NO: 106582 - protein, 9 aa, Homo sapiens
  misc_feature (1)..(9): Table A2; Target 3740; MAGEA10; ENSG00000124260; HLA-A*02:04;
KVTDLVQFL

SEQ ID NO: 106583 - protein, 9 aa, Homo sapiens
  misc_feature (1)..(9): Table A2; Target 3741; MAGEA10; ENSG00000124260; HLA-A*02:07;
KVTDLVQFL

SEQ ID NO: 106584 - protein, 9 aa, Homo sapiens
  misc_feature (1)..(9): Table A2; Target 3742; MAGEA10; ENSG00000124260; HLA-A*24:02;
KVTDLVQFL

SEQ ID NO: 106585 - protein, 9 aa, Homo sapiens
  misc_feature (1)..(9): Table A2; Target 3743; MAGEA10; ENSG00000124260; HLA-A*31:01;
KVTDLVQFL

SEQ ID NO: 106586 - protein, 9 aa, Homo sapiens
  misc_feature (1)..(9): Table A2; Target 3744; MAGEA10; ENSG00000124260; HLA-A*32:01;
KVTDLVQFL

SEQ ID NO: 106587 - protein, 9 aa, Homo sapiens
  misc_feature (1)..(9): Table A2; Target 3745; MAGEA10; ENSG00000124260; HLA-A*68:02;
KVTDLVQFL

SEQ ID NO: 106588 - protein, 9 aa, Homo sapiens
  misc_feature (1)..(9): Table A2; Target 3746; MAGEA10; ENSG00000124260; HLA-B*13:02;
KVTDLVQFL

SEQ ID NO: 106589 - protein, 9 aa, Homo sapiens
  misc_feature (1)..(9): Table A2; Target 3747; MAGEA10; ENSG00000124260; HLA-B*27:05;
KVTDLVQFL

SEQ ID NO: 106590 - protein, 9 aa, Homo sapiens
  misc_feature (1)..(9): Table A2; Target 3748; MAGEA10; ENSG00000124260; HLA-B*58:01;
KVTDLVQFL

SEQ ID NO: 106591 - protein, 8 aa, Homo sapiens
  misc_feature (1)..(8): Table A2; Target 3749; MAGEA10; ENSG00000124260; HLA-A*32:01;
KVTDLVQF

SEQ ID NO: 106592 - protein, 10 aa, Homo sapiens
  misc_feature (1)..(10): Table A2; Target 3750; MAGEA10; ENSG00000124260; HLA-B*49:01;
LEGAQAPLAV

SEQ ID NO: 106593 - protein, 9 aa, Homo sapiens
  misc_feature (1)..(9): Table A2; Target 3751; MAGEA10; ENSG00000124260; HLA-B*49:01;
LEGAQAPLA

SEQ ID NO: 106594 - protein, 8 aa, Homo sapiens
  misc_feature (1)..(8): Table A2; Target 3752; MAGEA10; ENSG00000124260; HLA-B*18:01;
LEGAQAPL

SEQ ID NO: 106595 - protein, 8 aa, Homo sapiens
  misc_feature (1)..(8): Table A2; Target 3753; MAGEA10; ENSG00000124260; HLA-B*18:01;
LESVIRNY

SEQ ID NO: 106596 - protein, 8 aa, Homo sapiens
  misc_feature (1)..(8): Table A2; Target 3754; MAGEA10; ENSG00000124260; HLA-B*37:01;
LESVIRNY

SEQ ID NO: 106597 - protein, 8 aa, Homo sapiens
  misc_feature (1)..(8): Table A2; Target 3755; MAGEA10; ENSG00000124260; HLA-B*44:02;
LESVIRNY

SEQ ID NO: 106598 - protein, 8 aa, Homo sapiens
  misc_feature (1)..(8): Table A2; Target 3756; MAGEA10; ENSG00000124260; HLA-B*44:03;
LESVIRNY

SEQ ID NO: 106599 - protein, 8 aa, Homo sapiens
  misc_feature (1)..(8): Table A2; Target 3757; MAGEA10; ENSG00000124260; HLA-C*02:02;
LESVIRNY

SEQ ID NO: 106600 - protein, 8 aa, Homo sapiens
  misc_feature (1)..(8): Table A2; Target 3758; MAGEA10; ENSG00000124260; HLA-C*16:01;
LESVIRNY

SEQ ID NO: 106601 - protein, 8 aa, Homo sapiens
  misc_feature (1)..(8): Table A2; Target 3759; MAGEA10; ENSG00000124260; HLA-C*16:04;
LESVIRNY

SEQ ID NO: 106602 - protein, 9 aa, Homo sapiens
  misc_feature (1)..(9): Table A2; Target 3760; MAGEA10; ENSG00000124260; HLA-C*14:02;
LFSEASECM

SEQ ID NO: 106603 - protein, 9 aa, Homo sapiens
  misc_feature (1)..(9): Table A2; Target 3761; MAGEA10; ENSG00000124260; HLA-A*02:01;
LIPSTPEEV

SEQ ID NO: 106604 - protein, 9 aa, Homo sapiens
  misc_feature (1)..(9): Table A2; Target 3762; MAGEA10; ENSG00000124260; HLA-A*02:07;
LIPSTPEEV

SEQ ID NO: 106605 - protein, 9 aa, Homo sapiens
  misc_feature (1)..(9): Table A2; Target 3763; MAGEA10; ENSG00000124260; HLA-A*03:01;
LIYGEPRKL

SEQ ID NO: 106606 - protein, 11 aa, Homo sapiens
  misc_feature (1)..(11): Table A2; Target 3764; MAGEA10; ENSG00000124260; HLA-A*02:01;
LLFSEASECML

SEQ ID NO: 106607 - protein, 9 aa, Homo sapiens
  misc_feature (1)..(9): Table A2; Target 3765; MAGEA10; ENSG00000124260; HLA-A*02:01;
LLFSEASEC

SEQ ID NO: 106608 - protein, 10 aa, Homo sapiens
  misc_feature (1)..(10): Table A2; Target 3766; MAGEA10; ENSG00000124260; HLA-B*27:05;
LQSQSETQGL

SEQ ID NO: 106609 - protein, 10 aa, Homo sapiens
  misc_feature (1)..(10): Table A2; Target 3767; MAGEA10; ENSG00000124260; HLA-B*38:01;
LQSQSETQGL

SEQ ID NO: 106610 - protein, 10 aa, Homo sapiens
  misc_feature (1)..(10): Table A2; Target 3768; MAGEA10; ENSG00000124260; HLA-B*39:01;
LQSQSETQGL

SEQ ID NO: 106611 - protein, 10 aa, Homo sapiens
  misc_feature (1)..(10): Table A2; Target 3769; MAGEA10; ENSG00000124260; HLA-B*39:01;
LQVLPDSESL

SEQ ID NO: 106612 - protein, 9 aa, Homo sapiens
  misc_feature (1)..(9): Table A2; Target 3770; MAGEA10; ENSG00000124260; HLA-A*01:01;
LSDVQSMPK

SEQ ID NO: 106613 - protein, 9 aa, Homo sapiens
  misc_feature (1)..(9): Table A2; Target 3771; MAGEA10; ENSG00000124260; HLA-A*03:01;
LSDVQSMPK

SEQ ID NO: 106614 - protein, 9 aa, Homo sapiens
  misc_feature (1)..(9): Table A2; Target 3772; MAGEA10; ENSG00000124260; HLA-A*03:02;
LSDVQSMPK

SEQ ID NO: 106615 - protein, 9 aa, Homo sapiens
  misc_feature (1)..(9): Table A2; Target 3773; MAGEA10; ENSG00000124260; HLA-A*11:01;
LSDVQSMPK

SEQ ID NO: 106616 - protein, 9 aa, Homo sapiens
  misc_feature (1)..(9): Table A2; Target 3774; MAGEA10; ENSG00000124260; HLA-B*27:02;
LSDVQSMPK

SEQ ID NO: 106617 - protein, 9 aa, Homo sapiens
  misc_feature (1)..(9): Table A2; Target 3775; MAGEA10; ENSG00000124260; HLA-A*01:01;
LSIVFIEGY

SEQ ID NO: 106618 - protein, 9 aa, Homo sapiens
  misc_feature (1)..(9): Table A2; Target 3776; MAGEA10; ENSG00000124260; HLA-A*30:02;
LSIVFIEGY

SEQ ID NO: 106619 - protein, 9 aa, Homo sapiens
  misc_feature (1)..(9): Table A2; Target 3777; MAGEA10; ENSG00000124260; HLA-B*46:01;
LSIVFIEGY

SEQ ID NO: 106620 - protein, 9 aa, Homo sapiens
  misc_feature (1)..(9): Table A2; Target 3778; MAGEA10; ENSG00000124260; HLA-B*57:01;
LSIVFIEGY

SEQ ID NO: 106621 - protein, 11 aa, Homo sapiens
  misc_feature (1)..(11): Table A2; Target 3779; MAGEA10; ENSG00000124260; HLA-C*04:01;
LTQDWVQENYL

SEQ ID NO: 106622 - protein, 10 aa, Homo sapiens
  misc_feature (1)..(10): Table A2; Target 3780; MAGEA10; ENSG00000124260; HLA-A*01:01;
LTQDWVQENY

SEQ ID NO: 106623 - protein, 10 aa, Homo sapiens
  misc_feature (1)..(10): Table A2; Target 3781; MAGEA10; ENSG00000124260; HLA-A*29:02;
LTQDWVQENY

SEQ ID NO: 106624 - protein, 10 aa, Homo sapiens
  misc_feature (1)..(10): Table A2; Target 3782; MAGEA10; ENSG00000124260; HLA-A*30:02;
LTQDWVQENY

SEQ ID NO: 106625 - protein, 10 aa, Homo sapiens
  misc_feature (1)..(10): Table A2; Target 3783; MAGEA10; ENSG00000124260; HLA-A*32:01;
LTQDWVQENY

SEQ ID NO: 106626 - protein, 10 aa, Homo sapiens
  misc_feature (1)..(10): Table A2; Target 3784; MAGEA10; ENSG00000124260; HLA-B*57:01;
LTQDWVQENY

SEQ ID NO: 106627 - protein, 10 aa, Homo sapiens
  misc_feature (1)..(10): Table A2; Target 3785; MAGEA10; ENSG00000124260; HLA-B*58:01;
LTQDWVQENY

SEQ ID NO: 106628 - protein, 10 aa, Homo sapiens
  misc_feature (1)..(10): Table A2; Target 3786; MAGEA10; ENSG00000124260; HLA-A*02:03;
LTYDGMLSDV

SEQ ID NO: 106629 - protein, 10 aa, Homo sapiens
  misc_feature (1)..(10): Table A2; Target 3787; MAGEA10; ENSG00000124260; HLA-A*68:02;
LTYDGMLSDV

SEQ ID NO: 106630 - protein, 10 aa, Homo sapiens
  misc_feature (1)..(10): Table A2; Target 3788; MAGEA10; ENSG00000124260; HLA-A*02:03;
LVFGIDVKEV

SEQ ID NO: 106631 - protein, 10 aa, Homo sapiens
  misc_feature (1)..(10): Table A2; Target 3789; MAGEA10; ENSG00000124260; HLA-A*68:02;
LVFGIDVKEV

SEQ ID NO: 106632 - protein, 8 aa, Homo sapiens
  misc_feature (1)..(8): Table A2; Target 3790; MAGEA10; ENSG00000124260; HLA-B*27:02;
LVFGIDVK

SEQ ID NO: 106633 - protein, 9 aa, Homo sapiens
  misc_feature (1)..(9): Table A2; Target 3791; MAGEA10; ENSG00000124260; HLA-A*29:02;
LVQFLLFKY

SEQ ID NO: 106634 - protein, 9 aa, Homo sapiens
  misc_feature (1)..(9): Table A2; Target 3792; MAGEA10; ENSG00000124260; HLA-A*01:01;
LVTSLGLTY

SEQ ID NO: 106635 - protein, 9 aa, Homo sapiens
  misc_feature (1)..(9): Table A2; Target 3793; MAGEA10; ENSG00000124260; HLA-A*03:01;
LVTSLGLTY

SEQ ID NO: 106636 - protein, 9 aa, Homo sapiens
  misc_feature (1)..(9): Table A2; Target 3794; MAGEA10; ENSG00000124260; HLA-A*25:01;
LVTSLGLTY

SEQ ID NO: 106637 - protein, 9 aa, Homo sapiens
  misc_feature (1)..(9): Table A2; Target 3795; MAGEA10; ENSG00000124260; HLA-A*26:01;
LVTSLGLTY

SEQ ID NO: 106638 - protein, 9 aa, Homo sapiens
  misc_feature (1)..(9): Table A2; Target 3796; MAGEA10; ENSG00000124260; HLA-A*29:02;
LVTSLGLTY

SEQ ID NO: 106639 - protein, 9 aa, Homo sapiens
  misc_feature (1)..(9): Table A2; Target 3797; MAGEA10; ENSG00000124260; HLA-A*30:02;
LVTSLGLTY

SEQ ID NO: 106640 - protein, 9 aa, Homo sapiens
  misc_feature (1)..(9): Table A2; Target 3798; MAGEA10; ENSG00000124260; HLA-A*32:01;
LVTSLGLTY

SEQ ID NO: 106641 - protein, 9 aa, Homo sapiens
  misc_feature (1)..(9): Table A2; Target 3799; MAGEA10; ENSG00000124260; HLA-B*15:01;
LVTSLGLTY

SEQ ID NO: 106642 - protein, 9 aa, Homo sapiens
  misc_feature (1)..(9): Table A2; Target 3800; MAGEA10; ENSG00000124260; HLA-B*15:03;
LVTSLGLTY

SEQ ID NO: 106643 - protein, 9 aa, Homo sapiens
  misc_feature (1)..(9): Table A2; Target 3801; MAGEA10; ENSG00000124260; HLA-B*18:01;
LVTSLGLTY

SEQ ID NO: 106644 - protein, 9 aa, Homo sapiens
  misc_feature (1)..(9): Table A2; Target 3802; MAGEA10; ENSG00000124260; HLA-B*35:01;
LVTSLGLTY

SEQ ID NO: 106645 - protein, 9 aa, Homo sapiens
  misc_feature (1)..(9): Table A2; Target 3803; MAGEA10; ENSG00000124260; HLA-B*46:01;
LVTSLGLTY

SEQ ID NO: 106646 - protein, 9 aa, Homo sapiens
  misc_feature (1)..(9): Table A2; Target 3804; MAGEA10; ENSG00000124260; HLA-B*58:01;
LVTSLGLTY

SEQ ID NO: 106647 - protein, 9 aa, Homo sapiens
  misc_feature (1)..(9): Table A2; Target 3805; MAGEA10; ENSG00000124260; HLA-C*02:02;
LVTSLGLTY

SEQ ID NO: 106648 - protein, 9 aa, Homo sapiens
  misc_feature (1)..(9): Table A2; Target 3806; MAGEA10; ENSG00000124260; HLA-C*07:04;
LVTSLGLTY

SEQ ID NO: 106649 - protein, 9 aa, Homo sapiens
  misc_feature (1)..(9): Table A2; Target 3807; MAGEA10; ENSG00000124260; HLA-C*14:02;
LVTSLGLTY

SEQ ID NO: 106650 - protein, 9 aa, Homo sapiens
  misc_feature (1)..(9): Table A2; Target 3808; MAGEA10; ENSG00000124260; HLA-C*16:01;
LVTSLGLTY

SEQ ID NO: 106651 - protein, 9 aa, Homo sapiens
  misc_feature (1)..(9): Table A2; Target 3809; MAGEA10; ENSG00000124260; HLA-C*16:02;
LVTSLGLTY

SEQ ID NO: 106652 - protein, 9 aa, Homo sapiens
  misc_feature (1)..(9): Table A2; Target 3810; MAGEA10; ENSG00000124260; HLA-C*16:04;
LVTSLGLTY

SEQ ID NO: 106653 - protein, 10 aa, Homo sapiens
  misc_feature (1)..(10): Table A2; Target 3811; MAGEA10; ENSG00000124260; HLA-A*29:02;
LYDGMEHLIY

SEQ ID NO: 106654 - protein, 10 aa, Homo sapiens
  misc_feature (1)..(10): Table A2; Target 3812; MAGEA10; ENSG00000124260; HLA-C*07:01;
LYDGMEHLIY

SEQ ID NO: 106655 - protein, 9 aa, Homo sapiens
  misc_feature (1)..(9): Table A2; Target 3813; MAGEA10; ENSG00000124260; HLA-A*02:07;
LYDGMEHLI

SEQ ID NO: 106656 - protein, 9 aa, Homo sapiens
  misc_feature (1)..(9): Table A2; Target 3814; MAGEA10; ENSG00000124260; HLA-A*23:01;
LYDGMEHLI

SEQ ID NO: 106657 - protein, 9 aa, Homo sapiens
  misc_feature (1)..(9): Table A2; Target 3815; MAGEA10; ENSG00000124260; HLA-A*24:02;
LYDGMEHLI

SEQ ID NO: 106658 - protein, 9 aa, Homo sapiens
  misc_feature (1)..(9): Table A2; Target 3816; MAGEA10; ENSG00000124260; HLA-B*35:01;
LYDGMEHLI

SEQ ID NO: 106659 - protein, 9 aa, Homo sapiens
  misc_feature (1)..(9): Table A2; Target 3817; MAGEA10; ENSG00000124260; HLA-B*35:03;
LYDGMEHLI

SEQ ID NO: 106660 - protein, 9 aa, Homo sapiens
  misc_feature (1)..(9): Table A2; Target 3818; MAGEA10; ENSG00000124260; HLA-B*38:01;
LYDGMEHLI

SEQ ID NO: 106661 - protein, 9 aa, Homo sapiens
  misc_feature (1)..(9): Table A2; Target 3819; MAGEA10; ENSG00000124260; HLA-C*04:01;
LYDGMEHLI

SEQ ID NO: 106662 - protein, 8 aa, Homo sapiens
  misc_feature (1)..(8): Table A2; Target 3820; MAGEA10; ENSG00000124260; HLA-C*04:01;
LYDGMEHL

SEQ ID NO: 106663 - protein, 9 aa, Homo sapiens
  misc_feature (1)..(9): Table A2; Target 3821; MAGEA10; ENSG00000124260; HLA-C*03:04;
MASASSSAT

SEQ ID NO: 106664 - protein, 8 aa, Homo sapiens
  misc_feature (1)..(8): Table A2; Target 3822; MAGEA10; ENSG00000124260; HLA-B*54:01;
MASASSSA

SEQ ID NO: 106665 - protein, 9 aa, Homo sapiens
  misc_feature (1)..(9): Table A2; Target 3823; MAGEA10; ENSG00000124260; HLA-B*40:02;
MEHLIYGEP

SEQ ID NO: 106666 - protein, 9 aa, Homo sapiens
  misc_feature (1)..(9): Table A2; Target 3824; MAGEA10; ENSG00000124260; HLA-A*02:01;
MLLVFGIDV

SEQ ID NO: 106667 - protein, 9 aa, Homo sapiens
  misc_feature (1)..(9): Table A2; Target 3825; MAGEA10; ENSG00000124260; HLA-A*02:04;
MLLVFGIDV

SEQ ID NO: 106668 - protein, 11 aa, Homo sapiens
  misc_feature (1)..(11): Table A2; Target 3826; MAGEA10; ENSG00000124260; HLA-C*06:02;
MLSDVQSMPKT

SEQ ID NO: 106669 - protein, 10 aa, Homo sapiens
  misc_feature (1)..(10): Table A2; Target 3827; MAGEA10; ENSG00000124260; HLA-A*01:01;
MLSDVQSMPK

SEQ ID NO: 106670 - protein, 10 aa, Homo sapiens
  misc_feature (1)..(10): Table A2; Target 3828; MAGEA10; ENSG00000124260; HLA-A*03:01;
MLSDVQSMPK

SEQ ID NO: 106671 - protein, 10 aa, Homo sapiens
  misc_feature (1)..(10): Table A2; Target 3829; MAGEA10; ENSG00000124260; HLA-A*03:02;
MLSDVQSMPK

SEQ ID NO: 106672 - protein, 10 aa, Homo sapiens
  misc_feature (1)..(10): Table A2; Target 3830; MAGEA10; ENSG00000124260; HLA-A*11:01;
MLSDVQSMPK

SEQ ID NO: 106673 - protein, 10 aa, Homo sapiens
  misc_feature (1)..(10): Table A2; Target 3831; MAGEA10; ENSG00000124260; HLA-A*68:01;
MLSDVQSMPK

SEQ ID NO: 106674 - protein, 10 aa, Homo sapiens
  misc_feature (1)..(10): Table A2; Target 3832; MAGEA10; ENSG00000124260; HLA-B*27:02;
MLSDVQSMPK

SEQ ID NO: 106675 - protein, 10 aa, Homo sapiens
  misc_feature (1)..(10): Table A2; Target 3833; MAGEA10; ENSG00000124260; HLA-B*27:05;
MLSDVQSMPK

SEQ ID NO: 106676 - protein, 10 aa, Homo sapiens
  misc_feature (1)..(10): Table A2; Target 3834; MAGEA10; ENSG00000124260; HLA-C*04:01;
MLSDVQSMPK

SEQ ID NO: 106677 - protein, 10 aa, Homo sapiens
  misc_feature (1)..(10): Table A2; Target 3835; MAGEA10; ENSG00000124260; HLA-C*06:02;
MLSDVQSMPK

SEQ ID NO: 106678 - protein, 10 aa, Homo sapiens
  misc_feature (1)..(10): Table A2; Target 3836; MAGEA10; ENSG00000124260; HLA-C*07:01;
MLSDVQSMPK

SEQ ID NO: 106679 - protein, 10 aa, Homo sapiens
  misc_feature (1)..(10): Table A2; Target 3837; MAGEA10; ENSG00000124260; HLA-C*07:06;
MLSDVQSMPK

SEQ ID NO: 106680 - protein, 8 aa, Homo sapiens
  misc_feature (1)..(8): Table A2; Target 3838; MAGEA10; ENSG00000124260; HLA-B*37:01;
MLSDVQSM

SEQ ID NO: 106681 - protein, 9 aa, Homo sapiens
  misc_feature (1)..(9): Table A2; Target 3839; MAGEA10; ENSG00000124260; HLA-B*35:01;
MPEEDLQSQ

SEQ ID NO: 106682 - protein, 9 aa, Homo sapiens
  misc_feature (1)..(9): Table A2; Target 3840; MAGEA10; ENSG00000124260; HLA-B*35:03;
MPEEDLQSQ

SEQ ID NO: 106683 - protein, 9 aa, Homo sapiens
  misc_feature (1)..(9): Table A2; Target 3841; MAGEA10; ENSG00000124260; HLA-B*55:01;
MPEEDLQSQ

SEQ ID NO: 106684 - protein, 9 aa, Homo sapiens
  misc_feature (1)..(9): Table A2; Target 3842; MAGEA10; ENSG00000124260; HLA-C*03:03;
MPEEDLQSQ

SEQ ID NO: 106685 - protein, 9 aa, Homo sapiens
  misc_feature (1)..(9): Table A2; Target 3843; MAGEA10; ENSG00000124260; HLA-B*07:02;
MPKTGILIL

SEQ ID NO: 106686 - protein, 9 aa, Homo sapiens
  misc_feature (1)..(9): Table A2; Target 3844; MAGEA10; ENSG00000124260; HLA-B*08:01;
MPKTGILIL

SEQ ID NO: 106687 - protein, 9 aa, Homo sapiens
  misc_feature (1)..(9): Table A2; Target 3845; MAGEA10; ENSG00000124260; HLA-B*35:01;
MPKTGILIL

SEQ ID NO: 106688 - protein, 9 aa, Homo sapiens
  misc_feature (1)..(9): Table A2; Target 3846; MAGEA10; ENSG00000124260; HLA-B*35:03;
MPKTGILIL

SEQ ID NO: 106689 - protein, 9 aa, Homo sapiens
  misc_feature (1)..(9): Table A2; Target 3847; MAGEA10; ENSG00000124260; HLA-B*51:01;
MPKTGILIL

SEQ ID NO: 106690 - protein, 9 aa, Homo sapiens
  misc_feature (1)..(9): Table A2; Target 3848; MAGEA10; ENSG00000124260; HLA-B*54:01;
MPKTGILIL

SEQ ID NO: 106691 - protein, 9 aa, Homo sapiens
  misc_feature (1)..(9): Table A2; Target 3849; MAGEA10; ENSG00000124260; HLA-C*07:02;
MPKTGILIL

SEQ ID NO: 106692 - protein, 8 aa, Homo sapiens
  misc_feature (1)..(8): Table A2; Target 3850; MAGEA10; ENSG00000124260; HLA-B*08:01;
MPKTGILI

SEQ ID NO: 106693 - protein, 8 aa, Homo sapiens
  misc_feature (1)..(8): Table A2; Target 3851; MAGEA10; ENSG00000124260; HLA-B*51:01;
MPKTGILI

SEQ ID NO: 106694 - protein, 8 aa, Homo sapiens
  misc_feature (1)..(8): Table A2; Target 3852; MAGEA10; ENSG00000124260; HLA-B*54:01;
MPKTGILI

SEQ ID NO: 106695 - protein, 10 aa, Homo sapiens
  misc_feature (1)..(10): Table A2; Target 3853; MAGEA10; ENSG00000124260; HLA-C*16:01;
NGSDPRSFPL

SEQ ID NO: 106696 - protein, 8 aa, Homo sapiens
  misc_feature (1)..(8): Table A2; Target 3854; MAGEA10; ENSG00000124260; HLA-C*16:01;
NGSDPRSF

SEQ ID NO: 106697 - protein, 8 aa, Homo sapiens
  misc_feature (1)..(8): Table A2; Target 3855; MAGEA10; ENSG00000124260; HLA-B*51:01;
NPPQSAQI

SEQ ID NO: 106698 - protein, 10 aa, Homo sapiens
  misc_feature (1)..(10): Table A2; Target 3856; MAGEA10; ENSG00000124260; HLA-A*24:02;
NYEDHFPLLF

SEQ ID NO: 106699 - protein, 10 aa, Homo sapiens
  misc_feature (1)..(10): Table A2; Target 3857; MAGEA10; ENSG00000124260; HLA-A*29:02;
NYEDHFPLLF

SEQ ID NO: 106700 - protein, 9 aa, Homo sapiens
  misc_feature (1)..(9): Table A2; Target 3858; MAGEA10; ENSG00000124260; HLA-A*23:01;
NYEDHFPLL

SEQ ID NO: 106701 - protein, 9 aa, Homo sapiens
  misc_feature (1)..(9): Table A2; Target 3859; MAGEA10; ENSG00000124260; HLA-A*24:02;
NYEDHFPLL

SEQ ID NO: 106702 - protein, 8 aa, Homo sapiens
  misc_feature (1)..(8): Table A2; Target 3860; MAGEA10; ENSG00000124260; HLA-B*27:02;
PDSESLPR

SEQ ID NO: 106703 - protein, 10 aa, Homo sapiens
  misc_feature (1)..(10): Table A2; Target 3861; MAGEA10; ENSG00000124260; HLA-A*02:03;
PLIPSTPEEV

SEQ ID NO: 106704 - protein, 9 aa, Homo sapiens
  misc_feature (1)..(9): Table A2; Target 3862; MAGEA10; ENSG00000124260; HLA-A*30:01;
QDWVQENYL

SEQ ID NO: 106705 - protein, 9 aa, Homo sapiens
  misc_feature (1)..(9): Table A2; Target 3863; MAGEA10; ENSG00000124260; HLA-A*02:01;
QIACSSPSV

SEQ ID NO: 106706 - protein, 9 aa, Homo sapiens
  misc_feature (1)..(9): Table A2; Target 3864; MAGEA10; ENSG00000124260; HLA-B*39:01;
QKEESPSTL

SEQ ID NO: 106707 - protein, 9 aa, Homo sapiens
  misc_feature (1)..(9): Table A2; Target 3865; MAGEA10; ENSG00000124260; HLA-A*02:03;
QMKEPITKA

SEQ ID NO: 106708 - protein, 9 aa, Homo sapiens
  misc_feature (1)..(9): Table A2; Target 3866; MAGEA10; ENSG00000124260; HLA-B*55:01;
QMKEPITKA

SEQ ID NO: 106709 - protein, 10 aa, Homo sapiens
  misc_feature (1)..(10): Table A2; Target 3867; MAGEA10; ENSG00000124260; HLA-A*01:01;
QSDEGSSSQK

SEQ ID NO: 106710 - protein, 9 aa, Homo sapiens
  misc_feature (1)..(9): Table A2; Target 3868; MAGEA10; ENSG00000124260; HLA-C*05:01;
QSDEGSSSQ

SEQ ID NO: 106711 - protein, 9 aa, Homo sapiens
  misc_feature (1)..(9): Table A2; Target 3869; MAGEA10; ENSG00000124260; HLA-B*08:01;
QSMPKTGIL

SEQ ID NO: 106712 - protein, 9 aa, Homo sapiens
  misc_feature (1)..(9): Table A2; Target 3870; MAGEA10; ENSG00000124260; HLA-B*58:01;
QSMPKTGIL

SEQ ID NO: 106713 - protein, 8 aa, Homo sapiens
  misc_feature (1)..(8): Table A2; Target 3871; MAGEA10; ENSG00000124260; HLA-B*08:01;
QSMPKTGI

SEQ ID NO: 106714 - protein, 11 aa, Homo sapiens
  misc_feature (1)..(11): Table A2; Target 3872; MAGEA10; ENSG00000124260; HLA-A*03:01;
QVLPDSESLPR

SEQ ID NO: 106715 - protein, 11 aa, Homo sapiens
  misc_feature (1)..(11): Table A2; Target 3873; MAGEA10; ENSG00000124260; HLA-A*11:01;
QVLPDSESLPR

SEQ ID NO: 106716 - protein, 11 aa, Homo sapiens
  misc_feature (1)..(11): Table A2; Target 3874; MAGEA10; ENSG00000124260; HLA-A*31:01;
QVLPDSESLPR

SEQ ID NO: 106717 - protein, 11 aa, Homo sapiens
  misc_feature (1)..(11): Table A2; Target 3875; MAGEA10; ENSG00000124260; HLA-A*33:01;
QVLPDSESLPR

SEQ ID NO: 106718 - protein, 11 aa, Homo sapiens
  misc_feature (1)..(11): Table A2; Target 3876; MAGEA10; ENSG00000124260; HLA-A*33:03;
QVLPDSESLPR

SEQ ID NO: 106719 - protein, 11 aa, Homo sapiens
  misc_feature (1)..(11): Table A2; Target 3877; MAGEA10; ENSG00000124260; HLA-A*68:01;
QVLPDSESLPR

SEQ ID NO: 106720 - protein, 11 aa, Homo sapiens
  misc_feature (1)..(11): Table A2; Target 3878; MAGEA10; ENSG00000124260; HLA-B*27:02;
QVLPDSESLPR

SEQ ID NO: 106721 - protein, 11 aa, Homo sapiens
  misc_feature (1)..(11): Table A2; Target 3879; MAGEA10; ENSG00000124260; HLA-C*07:06;
QVLPDSESLPR

SEQ ID NO: 106722 - protein, 9 aa, Homo sapiens
  misc_feature (1)..(9): Table A2; Target 3880; MAGEA10; ENSG00000124260; HLA-B*15:01;
QVLPDSESL

SEQ ID NO: 106723 - protein, 9 aa, Homo sapiens
  misc_feature (1)..(9): Table A2; Target 3881; MAGEA10; ENSG00000124260; HLA-B*35:01;
QVLPDSESL

SEQ ID NO: 106724 - protein, 9 aa, Homo sapiens
  misc_feature (1)..(9): Table A2; Target 3882; MAGEA10; ENSG00000124260; HLA-B*35:03;
QVLPDSESL

SEQ ID NO: 106725 - protein, 9 aa, Homo sapiens
  misc_feature (1)..(9): Table A2; Target 3883; MAGEA10; ENSG00000124260; HLA-B*38:01;
QVLPDSESL

SEQ ID NO: 106726 - protein, 9 aa, Homo sapiens
  misc_feature (1)..(9): Table A2; Target 3884; MAGEA10; ENSG00000124260; HLA-B*39:01;
QVLPDSESL

SEQ ID NO: 106727 - protein, 9 aa, Homo sapiens
  misc_feature (1)..(9): Table A2; Target 3885; MAGEA10; ENSG00000124260; HLA-C*01:02;
QVLPDSESL

SEQ ID NO: 106728 - protein, 9 aa, Homo sapiens
  misc_feature (1)..(9): Table A2; Target 3886; MAGEA10; ENSG00000124260; HLA-C*03:03;
QVLPDSESL

SEQ ID NO: 106729 - protein, 9 aa, Homo sapiens
  misc_feature (1)..(9): Table A2; Target 3887; MAGEA10; ENSG00000124260; HLA-C*03:04;
QVLPDSESL

SEQ ID NO: 106730 - protein, 10 aa, Homo sapiens
  misc_feature (1)..(10): Table A2; Target 3888; MAGEA10; ENSG00000124260; HLA-A*01:01;
QVPGSDPARY

SEQ ID NO: 106731 - protein, 10 aa, Homo sapiens
  misc_feature (1)..(10): Table A2; Target 3889; MAGEA10; ENSG00000124260; HLA-A*25:01;
QVPGSDPARY

SEQ ID NO: 106732 - protein, 10 aa, Homo sapiens
  misc_feature (1)..(10): Table A2; Target 3890; MAGEA10; ENSG00000124260; HLA-A*26:01;
QVPGSDPARY

SEQ ID NO: 106733 - protein, 10 aa, Homo sapiens
  misc_feature (1)..(10): Table A2; Target 3891; MAGEA10; ENSG00000124260; HLA-A*29:02;
QVPGSDPARY

SEQ ID NO: 106734 - protein, 10 aa, Homo sapiens
  misc_feature (1)..(10): Table A2; Target 3892; MAGEA10; ENSG00000124260; HLA-A*30:02;
QVPGSDPARY

SEQ ID NO: 106735 - protein, 10 aa, Homo sapiens
  misc_feature (1)..(10): Table A2; Target 3893; MAGEA10; ENSG00000124260; HLA-C*07:04;
QVPGSDPARY

SEQ ID NO: 106736 - protein, 11 aa, Homo sapiens
  misc_feature (1)..(11): Table A2; Target 3894; MAGEA10; ENSG00000124260; HLA-B*15:01;
RIATTDDTTAM

SEQ ID NO: 106737 - protein, 11 aa, Homo sapiens
  misc_feature (1)..(11): Table A2; Target 3895; MAGEA10; ENSG00000124260; HLA-B*57:01;
RNYEDHFPLLF

SEQ ID NO: 106738 - protein, 11 aa, Homo sapiens
  misc_feature (1)..(11): Table A2; Target 3896; MAGEA10; ENSG00000124260; HLA-A*29:02;
RQVPGSDPARY

SEQ ID NO: 106739 - protein, 11 aa, Homo sapiens
  misc_feature (1)..(11): Table A2; Target 3897; MAGEA10; ENSG00000124260; HLA-A*30:02;
RQVPGSDPARY

SEQ ID NO: 106740 - protein, 11 aa, Homo sapiens
  misc_feature (1)..(11): Table A2; Target 3898; MAGEA10; ENSG00000124260; HLA-A*32:01;
RQVPGSDPARY

SEQ ID NO: 106741 - protein, 11 aa, Homo sapiens
  misc_feature (1)..(11): Table A2; Target 3899; MAGEA10; ENSG00000124260; HLA-B*15:01;
RQVPGSDPARY

SEQ ID NO: 106742 - protein, 11 aa, Homo sapiens
  misc_feature (1)..(11): Table A2; Target 3900; MAGEA10; ENSG00000124260; HLA-B*15:03;
RQVPGSDPARY

SEQ ID NO: 106743 - protein, 11 aa, Homo sapiens
  misc_feature (1)..(11): Table A2; Target 3901; MAGEA10; ENSG00000124260; HLA-B*57:01;
RQVPGSDPARY

SEQ ID NO: 106744 - protein, 11 aa, Homo sapiens
  misc_feature (1)..(11): Table A2; Target 3902; MAGEA10; ENSG00000124260; HLA-B*58:01;
RQVPGSDPARY

SEQ ID NO: 106745 - protein, 10 aa, Homo sapiens
  misc_feature (1)..(10): Table A2; Target 3903; MAGEA10; ENSG00000124260; HLA-A*25:01;
SASSSATGSF

SEQ ID NO: 106746 - protein, 10 aa, Homo sapiens
  misc_feature (1)..(10): Table A2; Target 3904; MAGEA10; ENSG00000124260; HLA-A*26:01;
SASSSATGSF

SEQ ID NO: 106747 - protein, 10 aa, Homo sapiens
  misc_feature (1)..(10): Table A2; Target 3905; MAGEA10; ENSG00000124260; HLA-A*30:02;
SASSSATGSF

SEQ ID NO: 106748 - protein, 10 aa, Homo sapiens
  misc_feature (1)..(10): Table A2; Target 3906; MAGEA10; ENSG00000124260; HLA-B*07:02;
SASSSATGSF

SEQ ID NO: 106749 - protein, 10 aa, Homo sapiens
  misc_feature (1)..(10): Table A2; Target 3907; MAGEA10; ENSG00000124260; HLA-C*03:04;
SASSSATGSF

SEQ ID NO: 106750 - protein, 9 aa, Homo sapiens
  misc_feature (1)..(9): Table A2; Target 3908; MAGEA10; ENSG00000124260; HLA-C*16:02;
SATGSFSYP

SEQ ID NO: 106751 - protein, 8 aa, Homo sapiens
  misc_feature (1)..(8): Table A2; Target 3909; MAGEA10; ENSG00000124260; HLA-A*30:02;
SATGSFSY

SEQ ID NO: 106752 - protein, 8 aa, Homo sapiens
  misc_feature (1)..(8): Table A2; Target 3910; MAGEA10; ENSG00000124260; HLA-B*15:01;
SATGSFSY

SEQ ID NO: 106753 - protein, 8 aa, Homo sapiens
  misc_feature (1)..(8): Table A2; Target 3911; MAGEA10; ENSG00000124260; HLA-B*15:03;
SATGSFSY

SEQ ID NO: 106754 - protein, 8 aa, Homo sapiens
  misc_feature (1)..(8): Table A2; Target 3912; MAGEA10; ENSG00000124260; HLA-B*35:01;
SATGSFSY

SEQ ID NO: 106755 - protein, 8 aa, Homo sapiens
  misc_feature (1)..(8): Table A2; Target 3913; MAGEA10; ENSG00000124260; HLA-B*39:01;
SATGSFSY

SEQ ID NO: 106756 - protein, 8 aa, Homo sapiens
  misc_feature (1)..(8): Table A2; Target 3914; MAGEA10; ENSG00000124260; HLA-B*58:01;
SATGSFSY

SEQ ID NO: 106757 - protein, 8 aa, Homo sapiens
  misc_feature (1)..(8): Table A2; Target 3915; MAGEA10; ENSG00000124260; HLA-C*16:01;
SATGSFSY

SEQ ID NO: 106758 - protein, 8 aa, Homo sapiens
  misc_feature (1)..(8): Table A2; Target 3916; MAGEA10; ENSG00000124260; HLA-C*16:02;
SATGSFSY

SEQ ID NO: 106759 - protein, 8 aa, Homo sapiens
  misc_feature (1)..(8): Table A2; Target 3917; MAGEA10; ENSG00000124260; HLA-B*37:01;
SDPARYEF

SEQ ID NO: 106760 - protein, 9 aa, Homo sapiens
  misc_feature (1)..(9): Table A2; Target 3918; MAGEA10; ENSG00000124260; HLA-A*24:02;
SDPRSFPLW

SEQ ID NO: 106761 - protein, 8 aa, Homo sapiens
  misc_feature (1)..(8): Table A2; Target 3919; MAGEA10; ENSG00000124260; HLA-C*06:02;
SDVQSMPK

SEQ ID NO: 106762 - protein, 10 aa, Homo sapiens
  misc_feature (1)..(10): Table A2; Target 3920; MAGEA10; ENSG00000124260; HLA-B*49:01;
SEASECMLLV

SEQ ID NO: 106763 - protein, 9 aa, Homo sapiens
  misc_feature (1)..(9): Table A2; Target 3921; MAGEA10; ENSG00000124260; HLA-A*30:01;
SEASECMLL

SEQ ID NO: 106764 - protein, 9 aa, Homo sapiens
  misc_feature (1)..(9): Table A2; Target 3922; MAGEA10; ENSG00000124260; HLA-B*40:01;
SEASECMLL

SEQ ID NO: 106765 - protein, 9 aa, Homo sapiens
  misc_feature (1)..(9): Table A2; Target 3923; MAGEA10; ENSG00000124260; HLA-B*44:03;
SEASECMLL

SEQ ID NO: 106766 - protein, 9 aa, Homo sapiens
  misc_feature (1)..(9): Table A2; Target 3924; MAGEA10; ENSG00000124260; HLA-B*49:01;
SEASECMLL

SEQ ID NO: 106767 - protein, 8 aa, Homo sapiens
  misc_feature (1)..(8): Table A2; Target 3925; MAGEA10; ENSG00000124260; HLA-B*18:01;
SECMLLVF

SEQ ID NO: 106768 - protein, 11 aa, Homo sapiens
  misc_feature (1)..(11): Table A2; Target 3926; MAGEA10; ENSG00000124260; HLA-B*49:01;
SEIDEKVTDLV

SEQ ID NO: 106769 - protein, 10 aa, Homo sapiens
  misc_feature (1)..(10): Table A2; Target 3927; MAGEA10; ENSG00000124260; HLA-A*30:01;
SEIDEKVTDL

SEQ ID NO: 106770 - protein, 10 aa, Homo sapiens
  misc_feature (1)..(10): Table A2; Target 3928; MAGEA10; ENSG00000124260; HLA-B*40:01;
SEIDEKVTDL

SEQ ID NO: 106771 - protein, 10 aa, Homo sapiens
  misc_feature (1)..(10): Table A2; Target 3929; MAGEA10; ENSG00000124260; HLA-B*40:02;
SEIDEKVTDL

SEQ ID NO: 106772 - protein, 10 aa, Homo sapiens
  misc_feature (1)..(10): Table A2; Target 3930; MAGEA10; ENSG00000124260; HLA-B*44:02;
SEIDEKVTDL

SEQ ID NO: 106773 - protein, 10 aa, Homo sapiens
  misc_feature (1)..(10): Table A2; Target 3931; MAGEA10; ENSG00000124260; HLA-B*44:03;
SEIDEKVTDL

SEQ ID NO: 106774 - protein, 10 aa, Homo sapiens
  misc_feature (1)..(10): Table A2; Target 3932; MAGEA10; ENSG00000124260; HLA-B*49:01;
SEIDEKVTDL

SEQ ID NO: 106775 - protein, 9 aa, Homo sapiens
  misc_feature (1)..(9): Table A2; Target 3933; MAGEA10; ENSG00000124260; HLA-B*37:01;
SESLPRSEI

SEQ ID NO: 106776 - protein, 9 aa, Homo sapiens
  misc_feature (1)..(9): Table A2; Target 3934; MAGEA10; ENSG00000124260; HLA-B*40:01;
SESLPRSEI

SEQ ID NO: 106777 - protein, 9 aa, Homo sapiens
  misc_feature (1)..(9): Table A2; Target 3935; MAGEA10; ENSG00000124260; HLA-B*44:02;
SESLPRSEI

SEQ ID NO: 106778 - protein, 9 aa, Homo sapiens
  misc_feature (1)..(9): Table A2; Target 3936; MAGEA10; ENSG00000124260; HLA-B*44:03;
SESLPRSEI

SEQ ID NO: 106779 - protein, 9 aa, Homo sapiens
  misc_feature (1)..(9): Table A2; Target 3937; MAGEA10; ENSG00000124260; HLA-B*49:01;
SESLPRSEI

SEQ ID NO: 106780 - protein, 8 aa, Homo sapiens
  misc_feature (1)..(8): Table A2; Target 3938; MAGEA10; ENSG00000124260; HLA-A*23:01;
SFVLVTSL

SEQ ID NO: 106781 - protein, 8 aa, Homo sapiens
  misc_feature (1)..(8): Table A2; Target 3939; MAGEA10; ENSG00000124260; HLA-C*14:02;
SFVLVTSL

SEQ ID NO: 106782 - protein, 8 aa, Homo sapiens
  misc_feature (1)..(8): Table A2; Target 3940; MAGEA10; ENSG00000124260; HLA-B*15:01;
SIVFIEGY

SEQ ID NO: 106783 - protein, 9 aa, Homo sapiens
  misc_feature (1)..(9): Table A2; Target 3941; MAGEA10; ENSG00000124260; HLA-A*02:01;
SLLKFLAKV

SEQ ID NO: 106784 - protein, 9 aa, Homo sapiens
  misc_feature (1)..(9): Table A2; Target 3942; MAGEA10; ENSG00000124260; HLA-A*02:03;
SLLKFLAKV

SEQ ID NO: 106785 - protein, 9 aa, Homo sapiens
  misc_feature (1)..(9): Table A2; Target 3943; MAGEA10; ENSG00000124260; HLA-A*02:04;
SLLKFLAKV

SEQ ID NO: 106786 - protein, 9 aa, Homo sapiens
  misc_feature (1)..(9): Table A2; Target 3944; MAGEA10; ENSG00000124260; HLA-A*02:07;
SLLKFLAKV

SEQ ID NO: 106787 - protein, 8 aa, Homo sapiens
  misc_feature (1)..(8): Table A2; Target 3945; MAGEA10; ENSG00000124260; HLA-A*03:01;
SLLKFLAK

SEQ ID NO: 106788 - protein, 8 aa, Homo sapiens
  misc_feature (1)..(8): Table A2; Target 3946; MAGEA10; ENSG00000124260; HLA-B*07:02;
SPSTLQVL

SEQ ID NO: 106789 - protein, 10 aa, Homo sapiens
  misc_feature (1)..(10): Table A2; Target 3947; MAGEA10; ENSG00000124260; HLA-B*07:02;
SPSVVASLPL

SEQ ID NO: 106790 - protein, 10 aa, Homo sapiens
  misc_feature (1)..(10): Table A2; Target 3948; MAGEA10; ENSG00000124260; HLA-C*07:02;
SPSVVASLPL

SEQ ID NO: 106791 - protein, 8 aa, Homo sapiens
  misc_feature (1)..(8): Table A2; Target 3949; MAGEA10; ENSG00000124260; HLA-B*07:02;
SPSVVASL

SEQ ID NO: 106792 - protein, 8 aa, Homo sapiens
  misc_feature (1)..(8): Table A2; Target 3950; MAGEA10; ENSG00000124260; HLA-B*08:01;
SPSVVASL

SEQ ID NO: 106793 - protein, 8 aa, Homo sapiens
  misc_feature (1)..(8): Table A2; Target 3951; MAGEA10; ENSG00000124260; HLA-B*37:01;
SPSVVASL

SEQ ID NO: 106794 - protein, 8 aa, Homo sapiens
  misc_feature (1)..(8): Table A2; Target 3952; MAGEA10; ENSG00000124260; HLA-B*56:01;
SPSVVASL

SEQ ID NO: 106795 - protein, 8 aa, Homo sapiens
  misc_feature (1)..(8): Table A2; Target 3953; MAGEA10; ENSG00000124260; HLA-C*07:02;
SPSVVASL

SEQ ID NO: 106796 - protein, 10 aa, Homo sapiens
  misc_feature (1)..(10): Table A2; Target 3954; MAGEA10; ENSG00000124260; HLA-B*15:01;
SQKEESPSTL

SEQ ID NO: 106797 - protein, 9 aa, Homo sapiens
  misc_feature (1)..(9): Table A2; Target 3955; MAGEA10; ENSG00000124260; HLA-A*01:01;
SSATGSFSY

SEQ ID NO: 106798 - protein, 9 aa, Homo sapiens
  misc_feature (1)..(9): Table A2; Target 3956; MAGEA10; ENSG00000124260; HLA-A*11:01;
SSATGSFSY

SEQ ID NO: 106799 - protein, 9 aa, Homo sapiens
  misc_feature (1)..(9): Table A2; Target 3957; MAGEA10; ENSG00000124260; HLA-A*25:01;
SSATGSFSY

SEQ ID NO: 106800 - protein, 9 aa, Homo sapiens
  misc_feature (1)..(9): Table A2; Target 3958; MAGEA10; ENSG00000124260; HLA-A*26:01;
SSATGSFSY

SEQ ID NO: 106801 - protein, 9 aa, Homo sapiens
  misc_feature (1)..(9): Table A2; Target 3959; MAGEA10; ENSG00000124260; HLA-A*29:02;
SSATGSFSY

SEQ ID NO: 106802 - protein, 9 aa, Homo sapiens
  misc_feature (1)..(9): Table A2; Target 3960; MAGEA10; ENSG00000124260; HLA-A*30:02;
SSATGSFSY

SEQ ID NO: 106803 - protein, 9 aa, Homo sapiens
  misc_feature (1)..(9): Table A2; Target 3961; MAGEA10; ENSG00000124260; HLA-A*32:01;
SSATGSFSY

SEQ ID NO: 106804 - protein, 9 aa, Homo sapiens
  misc_feature (1)..(9): Table A2; Target 3962; MAGEA10; ENSG00000124260; HLA-B*15:01;
SSATGSFSY

SEQ ID NO: 106805 - protein, 9 aa, Homo sapiens
  misc_feature (1)..(9): Table A2; Target 3963; MAGEA10; ENSG00000124260; HLA-B*15:03;
SSATGSFSY

SEQ ID NO: 106806 - protein, 9 aa, Homo sapiens
  misc_feature (1)..(9): Table A2; Target 3964; MAGEA10; ENSG00000124260; HLA-B*27:05;
SSATGSFSY

SEQ ID NO: 106807 - protein, 9 aa, Homo sapiens
  misc_feature (1)..(9): Table A2; Target 3965; MAGEA10; ENSG00000124260; HLA-B*35:01;
SSATGSFSY

SEQ ID NO: 106808 - protein, 9 aa, Homo sapiens
  misc_feature (1)..(9): Table A2; Target 3966; MAGEA10; ENSG00000124260; HLA-B*46:01;
SSATGSFSY

SEQ ID NO: 106809 - protein, 9 aa, Homo sapiens
  misc_feature (1)..(9): Table A2; Target 3967; MAGEA10; ENSG00000124260; HLA-B*58:01;
SSATGSFSY

SEQ ID NO: 106810 - protein, 9 aa, Homo sapiens
  misc_feature (1)..(9): Table A2; Target 3968; MAGEA10; ENSG00000124260; HLA-C*02:02;
SSATGSFSY

SEQ ID NO: 106811 - protein, 9 aa, Homo sapiens
  misc_feature (1)..(9): Table A2; Target 3969; MAGEA10; ENSG00000124260; HLA-C*07:01;
SSATGSFSY

SEQ ID NO: 106812 - protein, 9 aa, Homo sapiens
  misc_feature (1)..(9): Table A2; Target 3970; MAGEA10; ENSG00000124260; HLA-C*07:06;
SSATGSFSY

SEQ ID NO: 106813 - protein, 9 aa, Homo sapiens
  misc_feature (1)..(9): Table A2; Target 3971; MAGEA10; ENSG00000124260; HLA-C*16:01;
SSATGSFSY

SEQ ID NO: 106814 - protein, 9 aa, Homo sapiens
  misc_feature (1)..(9): Table A2; Target 3972; MAGEA10; ENSG00000124260; HLA-C*16:02;
SSATGSFSY

SEQ ID NO: 106815 - protein, 9 aa, Homo sapiens
  misc_feature (1)..(9): Table A2; Target 3973; MAGEA10; ENSG00000124260; HLA-C*16:04;
SSATGSFSY

SEQ ID NO: 106816 - protein, 9 aa, Homo sapiens
  misc_feature (1)..(9): Table A2; Target 3974; MAGEA10; ENSG00000124260; HLA-A*02:07;
SSPSVVASL

SEQ ID NO: 106817 - protein, 9 aa, Homo sapiens
  misc_feature (1)..(9): Table A2; Target 3975; MAGEA10; ENSG00000124260; HLA-A*24:02;
SSPSVVASL

SEQ ID NO: 106818 - protein, 9 aa, Homo sapiens
  misc_feature (1)..(9): Table A2; Target 3976; MAGEA10; ENSG00000124260; HLA-A*25:01;
SSPSVVASL

SEQ ID NO: 106819 - protein, 9 aa, Homo sapiens
  misc_feature (1)..(9): Table A2; Target 3977; MAGEA10; ENSG00000124260; HLA-A*26:01;
SSPSVVASL

SEQ ID NO: 106820 - protein, 9 aa, Homo sapiens
  misc_feature (1)..(9): Table A2; Target 3978; MAGEA10; ENSG00000124260; HLA-B*46:01;
SSPSVVASL

SEQ ID NO: 106821 - protein, 9 aa, Homo sapiens
  misc_feature (1)..(9): Table A2; Target 3979; MAGEA10; ENSG00000124260; HLA-B*58:01;
SSPSVVASL

SEQ ID NO: 106822 - protein, 9 aa, Homo sapiens
  misc_feature (1)..(9): Table A2; Target 3980; MAGEA10; ENSG00000124260; HLA-C*01:02;
SSPSVVASL

SEQ ID NO: 106823 - protein, 9 aa, Homo sapiens
  misc_feature (1)..(9): Table A2; Target 3981; MAGEA10; ENSG00000124260; HLA-C*03:03;
SSPSVVASL

SEQ ID NO: 106824 - protein, 9 aa, Homo sapiens
  misc_feature (1)..(9): Table A2; Target 3982; MAGEA10; ENSG00000124260; HLA-C*03:04;
SSPSVVASL

SEQ ID NO: 106825 - protein, 9 aa, Homo sapiens
  misc_feature (1)..(9): Table A2; Target 3983; MAGEA10; ENSG00000124260; HLA-C*14:02;
SSPSVVASL

SEQ ID NO: 106826 - protein, 10 aa, Homo sapiens
  misc_feature (1)..(10): Table A2; Target 3984; MAGEA10; ENSG00000124260; HLA-A*01:01;
SSSATGSFSY

SEQ ID NO: 106827 - protein, 10 aa, Homo sapiens
  misc_feature (1)..(10): Table A2; Target 3985; MAGEA10; ENSG00000124260; HLA-A*29:02;
SSSATGSFSY

SEQ ID NO: 106828 - protein, 10 aa, Homo sapiens
  misc_feature (1)..(10): Table A2; Target 3986; MAGEA10; ENSG00000124260; HLA-A*30:02;
SSSATGSFSY

SEQ ID NO: 106829 - protein, 8 aa, Homo sapiens
  misc_feature (1)..(8): Table A2; Target 3987; MAGEA10; ENSG00000124260; HLA-C*05:01;
SSSATGSF

SEQ ID NO: 106830 - protein, 8 aa, Homo sapiens
  misc_feature (1)..(8): Table A2; Target 3988; MAGEA10; ENSG00000124260; HLA-B*37:01;
SSSFPSSF

SEQ ID NO: 106831 - protein, 8 aa, Homo sapiens
  misc_feature (1)..(8): Table A2; Target 3989; MAGEA10; ENSG00000124260; HLA-A*30:02;
SSSSSSCY

SEQ ID NO: 106832 - protein, 9 aa, Homo sapiens
  misc_feature (1)..(9): Table A2; Target 3990; MAGEA10; ENSG00000124260; HLA-A*01:01;
SSSSSSSCY

SEQ ID NO: 106833 - protein, 9 aa, Homo sapiens
  misc_feature (1)..(9): Table A2; Target 3991; MAGEA10; ENSG00000124260; HLA-A*26:01;
SSSSSSSCY

SEQ ID NO: 106834 - protein, 9 aa, Homo sapiens
  misc_feature (1)..(9): Table A2; Target 3992; MAGEA10; ENSG00000124260; HLA-A*30:02;
SSSSSSSCY

SEQ ID NO: 106835 - protein, 9 aa, Homo sapiens
  misc_feature (1)..(9): Table A2; Target 3993; MAGEA10; ENSG00000124260; HLA-B*15:01;
SSSSSSSCY

SEQ ID NO: 106836 - protein, 9 aa, Homo sapiens
  misc_feature (1)..(9): Table A2; Target 3994; MAGEA10; ENSG00000124260; HLA-B*15:03;
SSSSSSSCY

SEQ ID NO: 106837 - protein, 9 aa, Homo sapiens
  misc_feature (1)..(9): Table A2; Target 3995; MAGEA10; ENSG00000124260; HLA-C*07:04;
SSSSSSSCY

SEQ ID NO: 106838 - protein, 9 aa, Homo sapiens
  misc_feature (1)..(9): Table A2; Target 3996; MAGEA10; ENSG00000124260; HLA-C*16:01;
SSSSSSSCY

SEQ ID NO: 106839 - protein, 10 aa, Homo sapiens
  misc_feature (1)..(10): Table A2; Target 3997; MAGEA10; ENSG00000124260; HLA-A*30:02;
SSSSSSSSCY

SEQ ID NO: 106840 - protein, 11 aa, Homo sapiens
  misc_feature (1)..(11): Table A2; Target 3998; MAGEA10; ENSG00000124260; HLA-A*30:02;
SSSSSSSSSCY

SEQ ID NO: 106841 - protein, 9 aa, Homo sapiens
  misc_feature (1)..(9): Table A2; Target 3999; MAGEA10; ENSG00000124260; HLA-A*25:01;
SSTSTSSSF

SEQ ID NO: 106842 - protein, 9 aa, Homo sapiens
  misc_feature (1)..(9): Table A2; Target 4000; MAGEA10; ENSG00000124260; HLA-A*26:01;
SSTSTSSSF

SEQ ID NO: 106843 - protein, 9 aa, Homo sapiens
  misc_feature (1)..(9): Table A2; Target 4001; MAGEA10; ENSG00000124260; HLA-A*30:02;
SSTSTSSSF

SEQ ID NO: 106844 - protein, 9 aa, Homo sapiens
  misc_feature (1)..(9): Table A2; Target 4002; MAGEA10; ENSG00000124260; HLA-A*32:01;
SSTSTSSSF

SEQ ID NO: 106845 - protein, 9 aa, Homo sapiens
  misc_feature (1)..(9): Table A2; Target 4003; MAGEA10; ENSG00000124260; HLA-B*15:01;
SSTSTSSSF

SEQ ID NO: 106846 - protein, 9 aa, Homo sapiens
  misc_feature (1)..(9): Table A2; Target 4004; MAGEA10; ENSG00000124260; HLA-B*15:03;
SSTSTSSSF

SEQ ID NO: 106847 - protein, 9 aa, Homo sapiens
  misc_feature (1)..(9): Table A2; Target 4005; MAGEA10; ENSG00000124260; HLA-B*46:01;
SSTSTSSSF

SEQ ID NO: 106848 - protein, 9 aa, Homo sapiens
  misc_feature (1)..(9): Table A2; Target 4006; MAGEA10; ENSG00000124260; HLA-B*58:01;
SSTSTSSSF

SEQ ID NO: 106849 - protein, 9 aa, Homo sapiens
  misc_feature (1)..(9): Table A2; Target 4007; MAGEA10; ENSG00000124260; HLA-C*02:02;
SSTSTSSSF

SEQ ID NO: 106850 - protein, 9 aa, Homo sapiens
  misc_feature (1)..(9): Table A2; Target 4008; MAGEA10; ENSG00000124260; HLA-C*03:03;
SSTSTSSSF

SEQ ID NO: 106851 - protein, 9 aa, Homo sapiens
  misc_feature (1)..(9): Table A2; Target 4009; MAGEA10; ENSG00000124260; HLA-C*03:04;
SSTSTSSSF

SEQ ID NO: 106852 - protein, 9 aa, Homo sapiens
  misc_feature (1)..(9): Table A2; Target 4010; MAGEA10; ENSG00000124260; HLA-C*14:02;
SSTSTSSSF

SEQ ID NO: 106853 - protein, 9 aa, Homo sapiens
  misc_feature (1)..(9): Table A2; Target 4011; MAGEA10; ENSG00000124260; HLA-C*16:01;
SSTSTSSSF

SEQ ID NO: 106854 - protein, 9 aa, Homo sapiens
  misc_feature (1)..(9): Table A2; Target 4012; MAGEA10; ENSG00000124260; HLA-C*16:02;
SSTSTSSSF

SEQ ID NO: 106855 - protein, 9 aa, Homo sapiens
  misc_feature (1)..(9): Table A2; Target 4013; MAGEA10; ENSG00000124260; HLA-C*16:04;
SSTSTSSSF

SEQ ID NO: 106856 - protein, 10 aa, Homo sapiens
  misc_feature (1)..(10): Table A2; Target 4014; MAGEA10; ENSG00000124260; HLA-A*25:01;
STSSSFPSSF

SEQ ID NO: 106857 - protein, 10 aa, Homo sapiens
  misc_feature (1)..(10): Table A2; Target 4015; MAGEA10; ENSG00000124260; HLA-A*26:01;
STSSSFPSSF

SEQ ID NO: 106858 - protein, 8 aa, Homo sapiens
  misc_feature (1)..(8): Table A2; Target 4016; MAGEA10; ENSG00000124260; HLA-C*05:01;
STSTSSSF

SEQ ID NO: 106859 - protein, 10 aa, Homo sapiens
  misc_feature (1)..(10): Table A2; Target 4017; MAGEA10; ENSG00000124260; HLA-B*54:01;
TAMASASSSA

SEQ ID NO: 106860 - protein, 10 aa, Homo sapiens
  misc_feature (1)..(10): Table A2; Target 4018; MAGEA10; ENSG00000124260; HLA-B*56:01;
TAMASASSSA

SEQ ID NO: 106861 - protein, 8 aa, Homo sapiens
  misc_feature (1)..(8): Table A2; Target 4019; MAGEA10; ENSG00000124260; HLA-B*37:01;
TDLVQFLL

SEQ ID NO: 106862 - protein, 9 aa, Homo sapiens
  misc_feature (1)..(9): Table A2; Target 4020; MAGEA10; ENSG00000124260; HLA-A*68:02;
TKAEILESV

SEQ ID NO: 106863 - protein, 10 aa, Homo sapiens
  misc_feature (1)..(10): Table A2; Target 4021; MAGEA10; ENSG00000124260; HLA-B*35:03;
TPEEVIWEAL

SEQ ID NO: 106864 - protein, 9 aa, Homo sapiens
  misc_feature (1)..(9): Table A2; Target 4022; MAGEA10; ENSG00000124260; HLA-B*35:03;
TPEEVIWEA

SEQ ID NO: 106865 - protein, 9 aa, Homo sapiens
  misc_feature (1)..(9): Table A2; Target 4023; MAGEA10; ENSG00000124260; HLA-B*54:01;
TPEEVIWEA

SEQ ID NO: 106866 - protein, 9 aa, Homo sapiens
  misc_feature (1)..(9): Table A2; Target 4024; MAGEA10; ENSG00000124260; HLA-B*56:01;
TPEEVIWEA

SEQ ID NO: 106867 - protein, 11 aa, Homo sapiens
  misc_feature (1)..(11): Table A2; Target 4025; MAGEA10; ENSG00000124260; HLA-B*54:01;
TPNPPQSAQIA

SEQ ID NO: 106868 - protein, 11 aa, Homo sapiens
  misc_feature (1)..(11): Table A2; Target 4026; MAGEA10; ENSG00000124260; HLA-B*56:01;
TPNPPQSAQIA

SEQ ID NO: 106869 - protein, 10 aa, Homo sapiens
  misc_feature (1)..(10): Table A2; Target 4027; MAGEA10; ENSG00000124260; HLA-B*07:02;
TPNPPQSAQI

SEQ ID NO: 106870 - protein, 10 aa, Homo sapiens
  misc_feature (1)..(10): Table A2; Target 4028; MAGEA10; ENSG00000124260; HLA-B*51:01;
TPNPPQSAQI

SEQ ID NO: 106871 - protein, 10 aa, Homo sapiens
  misc_feature (1)..(10): Table A2; Target 4029; MAGEA10; ENSG00000124260; HLA-B*56:01;
TPNPPQSAQI

SEQ ID NO: 106872 - protein, 10 aa, Homo sapiens
  misc_feature (1)..(10): Table A2; Target 4030; MAGEA10; ENSG00000124260; HLA-C*07:02;
TPNPPQSAQI

SEQ ID NO: 106873 - protein, 8 aa, Homo sapiens
  misc_feature (1)..(8): Table A2; Target 4031; MAGEA10; ENSG00000124260; HLA-B*56:01;
TPNPPQSA

SEQ ID NO: 106874 - protein, 10 aa, Homo sapiens
  misc_feature (1)..(10): Table A2; Target 4032; MAGEA10; ENSG00000124260; HLA-B*38:01;
TQDWVQENYL

SEQ ID NO: 106875 - protein, 10 aa, Homo sapiens
  misc_feature (1)..(10): Table A2; Target 4033; MAGEA10; ENSG00000124260; HLA-C*05:01;
TQDWVQENYL

SEQ ID NO: 106876 - protein, 9 aa, Homo sapiens
  misc_feature (1)..(9): Table A2; Target 4034; MAGEA10; ENSG00000124260; HLA-A*01:01;
TQDWVQENY

SEQ ID NO: 106877 - protein, 9 aa, Homo sapiens
  misc_feature (1)..(9): Table A2; Target 4035; MAGEA10; ENSG00000124260; HLA-A*30:02;
TQDWVQENY

SEQ ID NO: 106878 - protein, 9 aa, Homo sapiens
  misc_feature (1)..(9): Table A2; Target 4036; MAGEA10; ENSG00000124260; HLA-B*15:01;
TQDWVQENY

SEQ ID NO: 106879 - protein, 9 aa, Homo sapiens
  misc_feature (1)..(9): Table A2; Target 4037; MAGEA10; ENSG00000124260; HLA-B*38:01;
TQDWVQENY

SEQ ID NO: 106880 - protein, 11 aa, Homo sapiens
  misc_feature (1)..(11): Table A2; Target 4038; MAGEA10; ENSG00000124260; HLA-B*27:05;
TQGLEGAQAPL

SEQ ID NO: 106881 - protein, 11 aa, Homo sapiens
  misc_feature (1)..(11): Table A2; Target 4039; MAGEA10; ENSG00000124260; HLA-B*38:01;
TQGLEGAQAPL

SEQ ID NO: 106882 - protein, 11 aa, Homo sapiens
  misc_feature (1)..(11): Table A2; Target 4040; MAGEA10; ENSG00000124260; HLA-B*39:01;
TQGLEGAQAPL

SEQ ID NO: 106883 - protein, 9 aa, Homo sapiens
  misc_feature (1)..(9): Table A2; Target 4041; MAGEA10; ENSG00000124260; HLA-A*25:01;
TSSSFPSSF

SEQ ID NO: 106884 - protein, 9 aa, Homo sapiens
  misc_feature (1)..(9): Table A2; Target 4042; MAGEA10; ENSG00000124260; HLA-A*26:01;
TSSSFPSSF

SEQ ID NO: 106885 - protein, 9 aa, Homo sapiens
  misc_feature (1)..(9): Table A2; Target 4043; MAGEA10; ENSG00000124260; HLA-A*30:02;
TSSSFPSSF

SEQ ID NO: 106886 - protein, 9 aa, Homo sapiens
  misc_feature (1)..(9): Table A2; Target 4044; MAGEA10; ENSG00000124260; HLA-A*32:01;
TSSSFPSSF

SEQ ID NO: 106887 - protein, 9 aa, Homo sapiens
  misc_feature (1)..(9): Table A2; Target 4045; MAGEA10; ENSG00000124260; HLA-B*37:01;
TSSSFPSSF

SEQ ID NO: 106888 - protein, 9 aa, Homo sapiens
  misc_feature (1)..(9): Table A2; Target 4046; MAGEA10; ENSG00000124260; HLA-C*02:02;
TSSSFPSSF

SEQ ID NO: 106889 - protein, 9 aa, Homo sapiens
  misc_feature (1)..(9): Table A2; Target 4047; MAGEA10; ENSG00000124260; HLA-C*16:01;
TSSSFPSSF

SEQ ID NO: 106890 - protein, 9 aa, Homo sapiens
  misc_feature (1)..(9): Table A2; Target 4048; MAGEA10; ENSG00000124260; HLA-C*16:04;
TSSSFPSSF

SEQ ID NO: 106891 - protein, 9 aa, Homo sapiens
  misc_feature (1)..(9): Table A2; Target 4049; MAGEA10; ENSG00000124260; HLA-A*01:01;
TTDDTTAMA

SEQ ID NO: 106892 - protein, 9 aa, Homo sapiens
  misc_feature (1)..(9): Table A2; Target 4050; MAGEA10; ENSG00000124260; HLA-C*05:01;
TTDDTTAMA

SEQ ID NO: 106893 - protein, 8 aa, Homo sapiens
  misc_feature (1)..(8): Table A2; Target 4051; MAGEA10; ENSG00000124260; HLA-B*35:03;
TTDDTTAM

SEQ ID NO: 106894 - protein, 8 aa, Homo sapiens
  misc_feature (1)..(8): Table A2; Target 4052; MAGEA10; ENSG00000124260; HLA-C*04:01;
TTDDTTAM

SEQ ID NO: 106895 - protein, 8 aa, Homo sapiens
  misc_feature (1)..(8): Table A2; Target 4053; MAGEA10; ENSG00000124260; HLA-C*05:01;
TTDDTTAM

SEQ ID NO: 106896 - protein, 8 aa, Homo sapiens
  misc_feature (1)..(8): Table A2; Target 4054; MAGEA10; ENSG00000124260; HLA-C*07:04;
TTDDTTAM

SEQ ID NO: 106897 - protein, 11 aa, Homo sapiens
  misc_feature (1)..(11): Table A2; Target 4055; MAGEA10; ENSG00000124260; HLA-C*04:01;
TYDGMLSDVQS

SEQ ID NO: 106898 - protein, 9 aa, Homo sapiens
  misc_feature (1)..(9): Table A2; Target 4056; MAGEA10; ENSG00000124260; HLA-B*35:01;
TYDGMLSDV

SEQ ID NO: 106899 - protein, 9 aa, Homo sapiens
  misc_feature (1)..(9): Table A2; Target 4057; MAGEA10; ENSG00000124260; HLA-B*35:03;
TYDGMLSDV

SEQ ID NO: 106900 - protein, 9 aa, Homo sapiens
  misc_feature (1)..(9): Table A2; Target 4058; MAGEA10; ENSG00000124260; HLA-C*04:01;
TYDGMLSDV

SEQ ID NO: 106901 - protein, 9 aa, Homo sapiens
  misc_feature (1)..(9): Table A2; Target 4059; MAGEA10; ENSG00000124260; HLA-C*05:01;
TYDGMLSDV

SEQ ID NO: 106902 - protein, 9 aa, Homo sapiens
  misc_feature (1)..(9): Table A2; Target 4060; MAGEA10; ENSG00000124260; HLA-C*07:04;
TYDGMLSDV

SEQ ID NO: 106903 - protein, 8 aa, Homo sapiens
  misc_feature (1)..(8): Table A2; Target 4061; MAGEA10; ENSG00000124260; HLA-B*37:01;
VDPTGHSF

SEQ ID NO: 106904 - protein, 8 aa, Homo sapiens
  misc_feature (1)..(8): Table A2; Target 4062; MAGEA10; ENSG00000124260; HLA-C*01:02;
VDPTGHSF

SEQ ID NO: 106905 - protein, 8 aa, Homo sapiens
  misc_feature (1)..(8): Table A2; Target 4063; MAGEA10; ENSG00000124260; HLA-C*04:01;
VDPTGHSF

SEQ ID NO: 106906 - protein, 8 aa, Homo sapiens
  misc_feature (1)..(8): Table A2; Target 4064; MAGEA10; ENSG00000124260; HLA-C*07:01;
VDPTGHSF

SEQ ID NO: 106907 - protein, 8 aa, Homo sapiens
  misc_feature (1)..(8): Table A2; Target 4065; MAGEA10; ENSG00000124260; HLA-C*14:02;
VDPTGHSF

SEQ ID NO: 106908 - protein, 8 aa, Homo sapiens
  misc_feature (1)..(8): Table A2; Target 4066; MAGEA10; ENSG00000124260; HLA-C*16:01;
VDPTGHSF

SEQ ID NO: 106909 - protein, 11 aa, Homo sapiens
  misc_feature (1)..(11): Table A2; Target 4067; MAGEA10; ENSG00000124260; HLA-A*30:01;
VEEDASSSTST

SEQ ID NO: 106910 - protein, 11 aa, Homo sapiens
  misc_feature (1)..(11): Table A2; Target 4068; MAGEA10; ENSG00000124260; HLA-B*15:03;
VKEVDPTGHSF

SEQ ID NO: 106911 - protein, 11 aa, Homo sapiens
  misc_feature (1)..(11): Table A2; Target 4069; MAGEA10; ENSG00000124260; HLA-A*02:07;
VLPDSESLPRS

SEQ ID NO: 106912 - protein, 8 aa, Homo sapiens
  misc_feature (1)..(8): Table A2; Target 4070; MAGEA10; ENSG00000124260; HLA-C*01:02;
VLPDSESL

SEQ ID NO: 106913 - protein, 10 aa, Homo sapiens
  misc_feature (1)..(10): Table A2; Target 4071; MAGEA10; ENSG00000124260; HLA-A*01:01;
VLVTSLGLTY

SEQ ID NO: 106914 - protein, 10 aa, Homo sapiens
  misc_feature (1)..(10): Table A2; Target 4072; MAGEA10; ENSG00000124260; HLA-A*23:01;
VLVTSLGLTY

SEQ ID NO: 106915 - protein, 10 aa, Homo sapiens
  misc_feature (1)..(10): Table A2; Target 4073; MAGEA10; ENSG00000124260; HLA-A*25:01;
VLVTSLGLTY

SEQ ID NO: 106916 - protein, 10 aa, Homo sapiens
  misc_feature (1)..(10): Table A2; Target 4074; MAGEA10; ENSG00000124260; HLA-A*26:01;
VLVTSLGLTY

SEQ ID NO: 106917 - protein, 10 aa, Homo sapiens
  misc_feature (1)..(10): Table A2; Target 4075; MAGEA10; ENSG00000124260; HLA-A*29:02;
VLVTSLGLTY

SEQ ID NO: 106918 - protein, 10 aa, Homo sapiens
  misc_feature (1)..(10): Table A2; Target 4076; MAGEA10; ENSG00000124260; HLA-A*30:02;
VLVTSLGLTY

SEQ ID NO: 106919 - protein, 10 aa, Homo sapiens
  misc_feature (1)..(10): Table A2; Target 4077; MAGEA10; ENSG00000124260; HLA-A*32:01;
VLVTSLGLTY

SEQ ID NO: 106920 - protein, 10 aa, Homo sapiens
  misc_feature (1)..(10): Table A2; Target 4078; MAGEA10; ENSG00000124260; HLA-B*15:01;
VLVTSLGLTY

SEQ ID NO: 106921 - protein, 10 aa, Homo sapiens
  misc_feature (1)..(10): Table A2; Target 4079; MAGEA10; ENSG00000124260; HLA-B*15:03;
VLVTSLGLTY

SEQ ID NO: 106922 - protein, 10 aa, Homo sapiens
  misc_feature (1)..(10): Table A2; Target 4080; MAGEA10; ENSG00000124260; HLA-B*46:01;
VLVTSLGLTY

SEQ ID NO: 106923 - protein, 10 aa, Homo sapiens
  misc_feature (1)..(10): Table A2; Target 4081; MAGEA10; ENSG00000124260; HLA-B*58:01;
VLVTSLGLTY

SEQ ID NO: 106924 - protein, 10 aa, Homo sapiens
  misc_feature (1)..(10): Table A2; Target 4082; MAGEA10; ENSG00000124260; HLA-C*02:02;
VLVTSLGLTY

SEQ ID NO: 106925 - protein, 10 aa, Homo sapiens
  misc_feature (1)..(10): Table A2; Target 4083; MAGEA10; ENSG00000124260; HLA-C*07:04;
VLVTSLGLTY

SEQ ID NO: 106926 - protein, 9 aa, Homo sapiens
  misc_feature (1)..(9): Table A2; Target 4084; MAGEA10; ENSG00000124260; HLA-C*16:01;
VNGSDPRSF

SEQ ID NO: 106927 - protein, 11 aa, Homo sapiens
  misc_feature (1)..(11): Table A2; Target 4085; MAGEA10; ENSG00000124260; HLA-B*35:01;
VPGSDPARYEF

SEQ ID NO: 106928 - protein, 11 aa, Homo sapiens
  misc_feature (1)..(11): Table A2; Target 4086; MAGEA10; ENSG00000124260; HLA-B*55:01;
VPGSDPARYEF

SEQ ID NO: 106929 - protein, 9 aa, Homo sapiens
  misc_feature (1)..(9): Table A2; Target 4087; MAGEA10; ENSG00000124260; HLA-A*30:02;
VPGSDPARY

SEQ ID NO: 106930 - protein, 9 aa, Homo sapiens
  misc_feature (1)..(9): Table A2; Target 4088; MAGEA10; ENSG00000124260; HLA-B*35:01;
VPGSDPARY

SEQ ID NO: 106931 - protein, 9 aa, Homo sapiens
  misc_feature (1)..(9): Table A2; Target 4089; MAGEA10; ENSG00000124260; HLA-B*55:01;
VPGSDPARY

SEQ ID NO: 106932 - protein, 9 aa, Homo sapiens
  misc_feature (1)..(9): Table A2; Target 4090; MAGEA10; ENSG00000124260; HLA-C*03:03;
VPGSDPARY

SEQ ID NO: 106933 - protein, 8 aa, Homo sapiens
  misc_feature (1)..(8): Table A2; Target 4091; MAGEA10; ENSG00000124260; HLA-A*01:01;
VQENYLEY

SEQ ID NO: 106934 - protein, 8 aa, Homo sapiens
  misc_feature (1)..(8): Table A2; Target 4092; MAGEA10; ENSG00000124260; HLA-B*39:01;
VQENYLEY

SEQ ID NO: 106935 - protein, 9 aa, Homo sapiens
  misc_feature (1)..(9): Table A2; Target 4093; MAGEA10; ENSG00000124260; HLA-A*32:01;
VQSMPKTGI

SEQ ID NO: 106936 - protein, 9 aa, Homo sapiens
  misc_feature (1)..(9): Table A2; Target 4094; MAGEA10; ENSG00000124260; HLA-B*13:02;
VQSMPKTGI

SEQ ID NO: 106937 - protein, 9 aa, Homo sapiens
  misc_feature (1)..(9): Table A2; Target 4095; MAGEA10; ENSG00000124260; HLA-B*38:01;
VQSMPKTGI

SEQ ID NO: 106938 - protein, 9 aa, Homo sapiens
  misc_feature (1)..(9): Table A2; Target 4096; MAGEA10; ENSG00000124260; HLA-C*06:02;
VQSMPKTGI

SEQ ID NO: 106939 - protein, 9 aa, Homo sapiens
  misc_feature (1)..(9): Table A2; Target 4097; MAGEA10; ENSG00000124260; HLA-C*07:04;
VQSMPKTGI

SEQ ID NO: 106940 - protein, 10 aa, Homo sapiens
  misc_feature (1)..(10): Table A2; Target 4098; MAGEA10; ENSG00000124260; HLA-A*01:01;
VTDLVQFLLF

SEQ ID NO: 106941 - protein, 9 aa, Homo sapiens
  misc_feature (1)..(9): Table A2; Target 4099; MAGEA10; ENSG00000124260; HLA-A*01:01;
VTDLVQFLL

SEQ ID NO: 106942 - protein, 9 aa, Homo sapiens
  misc_feature (1)..(9): Table A2; Target 4100; MAGEA10; ENSG00000124260; HLA-A*02:07;
VTDLVQFLL

SEQ ID NO: 106943 - protein, 8 aa, Homo sapiens
  misc_feature (1)..(8): Table A2; Target 4101; MAGEA10; ENSG00000124260; HLA-A*01:01;
VTDLVQFL

SEQ ID NO: 106944 - protein, 8 aa, Homo sapiens
  misc_feature (1)..(8): Table A2; Target 4102; MAGEA10; ENSG00000124260; HLA-C*04:01;
VTDLVQFL

SEQ ID NO: 106945 - protein, 8 aa, Homo sapiens
  misc_feature (1)..(8): Table A2; Target 4103; MAGEA10; ENSG00000124260; HLA-C*05:01;
VTDLVQFL

SEQ ID NO: 106946 - protein, 8 aa, Homo sapiens
  misc_feature (1)..(8): Table A2; Target 4104; MAGEA10; ENSG00000124260; HLA-A*01:01;
VTSLGLTY

SEQ ID NO: 106947 - protein, 8 aa, Homo sapiens
  misc_feature (1)..(8): Table A2; Target 4105; MAGEA10; ENSG00000124260; HLA-A*29:02;
VTSLGLTY

SEQ ID NO: 106948 - protein, 8 aa, Homo sapiens
  misc_feature (1)..(8): Table A2; Target 4106; MAGEA10; ENSG00000124260; HLA-A*32:01;
VTSLGLTY

SEQ ID NO: 106949 - protein, 8 aa, Homo sapiens
  misc_feature (1)..(8): Table A2; Target 4107; MAGEA10; ENSG00000124260; HLA-B*15:01;
VTSLGLTY

SEQ ID NO: 106950 - protein, 8 aa, Homo sapiens
  misc_feature (1)..(8): Table A2; Target 4108; MAGEA10; ENSG00000124260; HLA-B*46:01;
VTSLGLTY

SEQ ID NO: 106951 - protein, 8 aa, Homo sapiens
  misc_feature (1)..(8): Table A2; Target 4109; MAGEA10; ENSG00000124260; HLA-B*58:01;
VTSLGLTY

SEQ ID NO: 106952 - protein, 8 aa, Homo sapiens
  misc_feature (1)..(8): Table A2; Target 4110; MAGEA10; ENSG00000124260; HLA-C*03:04;
VTSLGLTY

SEQ ID NO: 106953 - protein, 8 aa, Homo sapiens
  misc_feature (1)..(8): Table A2; Target 4111; MAGEA10; ENSG00000124260; HLA-C*14:02;
VTSLGLTY

SEQ ID NO: 106954 - protein, 8 aa, Homo sapiens
  misc_feature (1)..(8): Table A2; Target 4112; MAGEA10; ENSG00000124260; HLA-C*16:01;
VTSLGLTY

SEQ ID NO: 106955 - protein, 9 aa, Homo sapiens
  misc_feature (1)..(9): Table A2; Target 4113; MAGEA10; ENSG00000124260; HLA-A*01:01;
WVQENYLEY

SEQ ID NO: 106956 - protein, 9 aa, Homo sapiens
  misc_feature (1)..(9): Table A2; Target 4114; MAGEA10; ENSG00000124260; HLA-A*25:01;
WVQENYLEY

SEQ ID NO: 106957 - protein, 9 aa, Homo sapiens
  misc_feature (1)..(9): Table A2; Target 4115; MAGEA10; ENSG00000124260; HLA-A*26:01;
WVQENYLEY

SEQ ID NO: 106958 - protein, 9 aa, Homo sapiens
  misc_feature (1)..(9): Table A2; Target 4116; MAGEA10; ENSG00000124260; HLA-A*29:02;
WVQENYLEY

SEQ ID NO: 106959 - protein, 9 aa, Homo sapiens
  misc_feature (1)..(9): Table A2; Target 4117; MAGEA10; ENSG00000124260; HLA-A*30:02;
WVQENYLEY

SEQ ID NO: 106960 - protein, 9 aa, Homo sapiens
  misc_feature (1)..(9): Table A2; Target 4118; MAGEA10; ENSG00000124260; HLA-B*15:01;
WVQENYLEY

SEQ ID NO: 106961 - protein, 9 aa, Homo sapiens
  misc_feature (1)..(9): Table A2; Target 4119; MAGEA10; ENSG00000124260; HLA-B*35:01;
WVQENYLEY

SEQ ID NO: 106962 - protein, 9 aa, Homo sapiens
  misc_feature (1)..(9): Table A2; Target 4120; MAGEA10; ENSG00000124260; HLA-C*07:04;
WVQENYLEY

SEQ ID NO: 106963 - protein, 8 aa, Homo sapiens
  misc_feature (1)..(8): Table A2; Target 4121; MAGEA10; ENSG00000124260; HLA-B*38:01;
YDGMEHLI

SEQ ID NO: 106964 - protein, 8 aa, Homo sapiens
  misc_feature (1)..(8): Table A2; Target 4122; MAGEA10; ENSG00000124260; HLA-C*07:01;
YDGMEHLI

SEQ ID NO: 106965 - protein, 8 aa, Homo sapiens
  misc_feature (1)..(8): Table A2; Target 4123; MAGEA10; ENSG00000124260; HLA-C*07:04;
YDGMEHLI

SEQ ID NO: 106966 - protein, 9 aa, Homo sapiens
  misc_feature (1)..(9): Table A2; Target 4124; MAGEA10; ENSG00000124260; HLA-A*01:01;
YEDHFPLLF

SEQ ID NO: 106967 - protein, 9 aa, Homo sapiens
  misc_feature (1)..(9): Table A2; Target 4125; MAGEA10; ENSG00000124260; HLA-A*02:07;
YEDHFPLLF

SEQ ID NO: 106968 - protein, 9 aa, Homo sapiens
  misc_feature (1)..(9): Table A2; Target 4126; MAGEA10; ENSG00000124260; HLA-A*24:02;
YEDHFPLLF

SEQ ID NO: 106969 - protein, 9 aa, Homo sapiens
  misc_feature (1)..(9): Table A2; Target 4127; MAGEA10; ENSG00000124260; HLA-A*29:02;
YEDHFPLLF

SEQ ID NO: 106970 - protein, 9 aa, Homo sapiens
  misc_feature (1)..(9): Table A2; Target 4128; MAGEA10; ENSG00000124260; HLA-B*18:01;
YEDHFPLLF

SEQ ID NO: 106971 - protein, 9 aa, Homo sapiens
  misc_feature (1)..(9): Table A2; Target 4129; MAGEA10; ENSG00000124260; HLA-B*44:02;
YEDHFPLLF

SEQ ID NO: 106972 - protein, 9 aa, Homo sapiens
  misc_feature (1)..(9): Table A2; Target 4130; MAGEA10; ENSG00000124260; HLA-B*44:03;
YEDHFPLLF

SEQ ID NO: 106973 - protein, 9 aa, Homo sapiens
  misc_feature (1)..(9): Table A2; Target 4131; MAGEA10; ENSG00000124260; HLA-B*49:01;
YEDHFPLLF

SEQ ID NO: 106974 - protein, 9 aa, Homo sapiens
  misc_feature (1)..(9): Table A2; Target 4132; MAGEA10; ENSG00000124260; HLA-B*57:01;
YEDHFPLLF

SEQ ID NO: 106975 - protein, 8 aa, Homo sapiens
  misc_feature (1)..(8): Table A2; Target 4133; MAGEA10; ENSG00000124260; HLA-B*18:01;
YEDHFPLL

SEQ ID NO: 106976 - protein, 8 aa, Homo sapiens
  misc_feature (1)..(8): Table A2; Target 4134; MAGEA10; ENSG00000124260; HLA-B*49:01;
YEDHFPLL

SEQ ID NO: 106977 - protein, 9 aa, Homo sapiens
  misc_feature (1)..(9): Table A2; Target 4135; MAGEA10; ENSG00000124260; HLA-A*02:04;
YEFLWGPRA

SEQ ID NO: 106978 - protein, 11 aa, Homo sapiens
  misc_feature (1)..(11): Table A2; Target 4136; MAGEA10; ENSG00000124260; HLA-A*68:02;
YPLIPSTPEEV

SEQ ID NO: 106979 - protein, 11 aa, Homo sapiens
  misc_feature (1)..(11): Table A2; Target 4137; MAGEA10; ENSG00000124260; HLA-B*51:01;
YPLIPSTPEEV

SEQ ID NO: 106980 - protein, 11 aa, Homo sapiens
  misc_feature (1)..(11): Table A2; Target 4138; MAGEA10; ENSG00000124260; HLA-B*54:01;
YPLIPSTPEEV

SEQ ID NO: 106981 - protein, 11 aa, Homo sapiens
  misc_feature (1)..(11): Table A2; Target 4139; MAGEA10; ENSG00000124260; HLA-B*56:01;
YPLIPSTPEEV

SEQ ID NO: 106982 - protein, 10 aa, Homo sapiens
  misc_feature (1)..(10): Table A2; Target 4140; MAGEA10; ENSG00000124260; HLA-A*02:03;
YQMKEPITKA

SEQ ID NO: 106983 - protein, 9 aa, Homo sapiens
  misc_feature (1)..(9): Table A2; Target 4141; MAGEA10; ENSG00000124260; HLA-A*03:01;
YQMKEPITK

SEQ ID NO: 106984 - protein, 9 aa, Homo sapiens
  misc_feature (1)..(9): Table A2; Target 4142; MAGEA10; ENSG00000124260; HLA-A*03:02;
YQMKEPITK

SEQ ID NO: 106985 - protein, 9 aa, Homo sapiens
  misc_feature (1)..(9): Table A2; Target 4143; MAGEA10; ENSG00000124260; HLA-A*11:01;
YQMKEPITK

SEQ ID NO: 106986 - protein, 9 aa, Homo sapiens
  misc_feature (1)..(9): Table A2; Target 4144; MAGEA10; ENSG00000124260; HLA-B*13:02;
YQMKEPITK

SEQ ID NO: 106987 - protein, 9 aa, Homo sapiens
  misc_feature (1)..(9): Table A2; Target 4145; MAGEA10; ENSG00000124260; HLA-B*27:05;
YQMKEPITK

SEQ ID NO: 106988 - protein, 9 aa, Homo sapiens
  misc_feature (1)..(9): Table A2; Target 4146; MAGEA10; ENSG00000124260; HLA-B*38:01;
YQMKEPITK

SEQ ID NO: 106989 - protein, 9 aa, Homo sapiens
  misc_feature (1)..(9): Table A2; Target 4147; MAGEA10; ENSG00000124260; HLA-C*02:02;
YQMKEPITK

SEQ ID NO: 106990 - protein, 9 aa, Homo sapiens
  misc_feature (1)..(9): Table A2; Target 4148; MAGEA10; ENSG00000124260; HLA-C*03:03;
YQMKEPITK

SEQ ID NO: 106991 - protein, 9 aa, Homo sapiens
  misc_feature (1)..(9): Table A2; Target 4149; MAGEA10; ENSG00000124260; HLA-C*03:04;
YQMKEPITK

SEQ ID NO: 106992 - protein, 9 aa, Homo sapiens
  misc_feature (1)..(9): Table A2; Target 4150; MAGEA10; ENSG00000124260; HLA-C*07:04;
YQMKEPITK

SEQ ID NO: 106993 - protein, 11 aa, Homo sapiens
  misc_feature (1)..(11): Table A2; Target 4151; MAGEA10; ENSG00000124260; HLA-B*27:05;
YRQVPGSDPAR

SEQ ID NO: 106994 - protein, 9 aa, Homo sapiens
  misc_feature (1)..(9): Table A2; Target 4152; MAGEA4; ENSG00000147381; HLA-B*07:02;
AAVSSSSPL

SEQ ID NO: 106995 - protein, 9 aa, Homo sapiens
  misc_feature (1)..(9): Table A2; Target 4153; MAGEA4; ENSG00000147381; HLA-B*15:01;
AAVSSSSPL

SEQ ID NO: 106996 - protein, 9 aa, Homo sapiens
  misc_feature (1)..(9): Table A2; Target 4154; MAGEA4; ENSG00000147381; HLA-B*35:03;
AAVSSSSPL

SEQ ID NO: 106997 - protein, 9 aa, Homo sapiens
  misc_feature (1)..(9): Table A2; Target 4155; MAGEA4; ENSG00000147381; HLA-B*39:01;
AAVSSSSPL

SEQ ID NO: 106998 - protein, 9 aa, Homo sapiens
  misc_feature (1)..(9): Table A2; Target 4156; MAGEA4; ENSG00000147381; HLA-B*40:01;
AAVSSSSPL

SEQ ID NO: 106999 - protein, 9 aa, Homo sapiens
  misc_feature (1)..(9): Table A2; Target 4157; MAGEA4; ENSG00000147381; HLA-B*46:01;
AAVSSSSPL

SEQ ID NO: 107000 - protein, 9 aa, Homo sapiens
  misc_feature (1)..(9): Table A2; Target 4158; MAGEA4; ENSG00000147381; HLA-B*58:01;
AAVSSSSPL

SEQ ID NO: 107001 - protein, 9 aa, Homo sapiens
  misc_feature (1)..(9): Table A2; Target 4159; MAGEA4; ENSG00000147381; HLA-C*01:02;
AAVSSSSPL

SEQ ID NO: 107002 - protein, 9 aa, Homo sapiens
  misc_feature (1)..(9): Table A2; Target 4160; MAGEA4; ENSG00000147381; HLA-C*02:02;
AAVSSSSPL

SEQ ID NO: 107003 - protein, 9 aa, Homo sapiens
  misc_feature (1)..(9): Table A2; Target 4161; MAGEA4; ENSG00000147381; HLA-C*03:03;
AAVSSSSPL

SEQ ID NO: 107004 - protein, 9 aa, Homo sapiens
  misc_feature (1)..(9): Table A2; Target 4162; MAGEA4; ENSG00000147381; HLA-C*03:04;
AAVSSSSPL

SEQ ID NO: 107005 - protein, 9 aa, Homo sapiens
  misc_feature (1)..(9): Table A2; Target 4163; MAGEA4; ENSG00000147381; HLA-C*07:02;
AAVSSSSPL

SEQ ID NO: 107006 - protein, 9 aa, Homo sapiens
  misc_feature (1)..(9): Table A2; Target 4164; MAGEA4; ENSG00000147381; HLA-C*12:03;
AAVSSSSPL

SEQ ID NO: 107007 - protein, 9 aa, Homo sapiens
  misc_feature (1)..(9): Table A2; Target 4165; MAGEA4; ENSG00000147381; HLA-C*14:02;
AAVSSSSPL

SEQ ID NO: 107008 - protein, 9 aa, Homo sapiens
  misc_feature (1)..(9): Table A2; Target 4166; MAGEA4; ENSG00000147381; HLA-C*16:01;
AAVSSSSPL

SEQ ID NO: 107009 - protein, 9 aa, Homo sapiens
  misc_feature (1)..(9): Table A2; Target 4167; MAGEA4; ENSG00000147381; HLA-C*16:04;
AAVSSSSPL

SEQ ID NO: 107010 - protein, 11 aa, Homo sapiens
  misc_feature (1)..(11): Table A2; Target 4168; MAGEA4; ENSG00000147381; HLA-A*30:02;
AEMLERVIKNY

SEQ ID NO: 107011 - protein, 11 aa, Homo sapiens
  misc_feature (1)..(11): Table A2; Target 4169; MAGEA4; ENSG00000147381; HLA-B*27:02;
AEMLERVIKNY

SEQ ID NO: 107012 - protein, 11 aa, Homo sapiens
  misc_feature (1)..(11): Table A2; Target 4170; MAGEA4; ENSG00000147381; HLA-B*44:02;
AEMLERVIKNY

SEQ ID NO: 107013 - protein, 11 aa, Homo sapiens
  misc_feature (1)..(11): Table A2; Target 4171; MAGEA4; ENSG00000147381; HLA-B*44:03;
AEMLERVIKNY

SEQ ID NO: 107014 - protein, 11 aa, Homo sapiens
  misc_feature (1)..(11): Table A2; Target 4172; MAGEA4; ENSG00000147381; HLA-B*57:01;
AEMLERVIKNY

SEQ ID NO: 107015 - protein, 11 aa, Homo sapiens
  misc_feature (1)..(11): Table A2; Target 4173; MAGEA4; ENSG00000147381; HLA-C*16:04;
AEMLERVIKNY

SEQ ID NO: 107016 - protein, 10 aa, Homo sapiens
  misc_feature (1)..(10): Table A2; Target 4174; MAGEA4; ENSG00000147381; HLA-B*44:02;
AEMLERVIKN

SEQ ID NO: 107017 - protein, 8 aa, Homo sapiens
  misc_feature (1)..(8): Table A2; Target 4175; MAGEA4; ENSG00000147381; HLA-B*37:01;
AEMLERVI

SEQ ID NO: 107018 - protein, 8 aa, Homo sapiens
  misc_feature (1)..(8): Table A2; Target 4176; MAGEA4; ENSG00000147381; HLA-B*44:02;
AEMLERVI

SEQ ID NO: 107019 - protein, 8 aa, Homo sapiens
  misc_feature (1)..(8): Table A2; Target 4177; MAGEA4; ENSG00000147381; HLA-B*44:03;
AEMLERVI

SEQ ID NO: 107020 - protein, 8 aa, Homo sapiens
  misc_feature (1)..(8): Table A2; Target 4178; MAGEA4; ENSG00000147381; HLA-B*49:01;
AEMLERVI

SEQ ID NO: 107021 - protein, 9 aa, Homo sapiens
  misc_feature (1)..(9): Table A2; Target 4179; MAGEA4; ENSG00000147381; HLA-A*30:01;
AESLFREAL

SEQ ID NO: 107022 - protein, 9 aa, Homo sapiens
  misc_feature (1)..(9): Table A2; Target 4180; MAGEA4; ENSG00000147381; HLA-B*07:02;
AESLFREAL

SEQ ID NO: 107023 - protein, 9 aa, Homo sapiens
  misc_feature (1)..(9): Table A2; Target 4181; MAGEA4; ENSG00000147381; HLA-B*18:01;
AESLFREAL

SEQ ID NO: 107024 - protein, 9 aa, Homo sapiens
  misc_feature (1)..(9): Table A2; Target 4182; MAGEA4; ENSG00000147381; HLA-B*27:02;
AESLFREAL

SEQ ID NO: 107025 - protein, 9 aa, Homo sapiens
  misc_feature (1)..(9): Table A2; Target 4183; MAGEA4; ENSG00000147381; HLA-B*37:01;
AESLFREAL

SEQ ID NO: 107026 - protein, 9 aa, Homo sapiens
  misc_feature (1)..(9): Table A2; Target 4184; MAGEA4; ENSG00000147381; HLA-B*40:01;
AESLFREAL

SEQ ID NO: 107027 - protein, 9 aa, Homo sapiens
  misc_feature (1)..(9): Table A2; Target 4185; MAGEA4; ENSG00000147381; HLA-B*40:02;
AESLFREAL

SEQ ID NO: 107028 - protein, 9 aa, Homo sapiens
  misc_feature (1)..(9): Table A2; Target 4186; MAGEA4; ENSG00000147381; HLA-B*44:02;
AESLFREAL

SEQ ID NO: 107029 - protein, 9 aa, Homo sapiens
  misc_feature (1)..(9): Table A2; Target 4187; MAGEA4; ENSG00000147381; HLA-B*44:03;
AESLFREAL

SEQ ID NO: 107030 - protein, 9 aa, Homo sapiens
  misc_feature (1)..(9): Table A2; Target 4188; MAGEA4; ENSG00000147381; HLA-B*49:01;
AESLFREAL

SEQ ID NO: 107031 - protein, 9 aa, Homo sapiens
  misc_feature (1)..(9): Table A2; Target 4189; MAGEA4; ENSG00000147381; HLA-C*16:04;
AESLFREAL

SEQ ID NO: 107032 - protein, 8 aa, Homo sapiens
  misc_feature (1)..(8): Table A2; Target 4190; MAGEA4; ENSG00000147381; HLA-B*37:01;
AESLFREA

SEQ ID NO: 107033 - protein, 9 aa, Homo sapiens
  misc_feature (1)..(9): Table A2; Target 4191; MAGEA4; ENSG00000147381; HLA-A*30:01;
AETSYVKVL

SEQ ID NO: 107034 - protein, 9 aa, Homo sapiens
  misc_feature (1)..(9): Table A2; Target 4192; MAGEA4; ENSG00000147381; HLA-B*18:01;
AETSYVKVL

SEQ ID NO: 107035 - protein, 9 aa, Homo sapiens
  misc_feature (1)..(9): Table A2; Target 4193; MAGEA4; ENSG00000147381; HLA-B*27:02;
AETSYVKVL

SEQ ID NO: 107036 - protein, 9 aa, Homo sapiens
  misc_feature (1)..(9): Table A2; Target 4194; MAGEA4; ENSG00000147381; HLA-B*27:05;
AETSYVKVL

SEQ ID NO: 107037 - protein, 9 aa, Homo sapiens
  misc_feature (1)..(9): Table A2; Target 4195; MAGEA4; ENSG00000147381; HLA-B*37:01;
AETSYVKVL

SEQ ID NO: 107038 - protein, 9 aa, Homo sapiens
  misc_feature (1)..(9): Table A2; Target 4196; MAGEA4; ENSG00000147381; HLA-B*40:01;
AETSYVKVL

SEQ ID NO: 107039 - protein, 9 aa, Homo sapiens
  misc_feature (1)..(9): Table A2; Target 4197; MAGEA4; ENSG00000147381; HLA-B*40:02;
AETSYVKVL

SEQ ID NO: 107040 - protein, 9 aa, Homo sapiens
  misc_feature (1)..(9): Table A2; Target 4198; MAGEA4; ENSG00000147381; HLA-B*44:02;
AETSYVKVL

SEQ ID NO: 107041 - protein, 9 aa, Homo sapiens
  misc_feature (1)..(9): Table A2; Target 4199; MAGEA4; ENSG00000147381; HLA-B*44:03;
AETSYVKVL

SEQ ID NO: 107042 - protein, 9 aa, Homo sapiens
  misc_feature (1)..(9): Table A2; Target 4200; MAGEA4; ENSG00000147381; HLA-B*49:01;
AETSYVKVL

SEQ ID NO: 107043 - protein, 9 aa, Homo sapiens
  misc_feature (1)..(9): Table A2; Target 4201; MAGEA4; ENSG00000147381; HLA-C*02:02;
AETSYVKVL

SEQ ID NO: 107044 - protein, 9 aa, Homo sapiens
  misc_feature (1)..(9): Table A2; Target 4202; MAGEA4; ENSG00000147381; HLA-C*07:04;
AETSYVKVL

SEQ ID NO: 107045 - protein, 9 aa, Homo sapiens
  misc_feature (1)..(9): Table A2; Target 4203; MAGEA4; ENSG00000147381; HLA-C*12:03;
AETSYVKVL

SEQ ID NO: 107046 - protein, 9 aa, Homo sapiens
  misc_feature (1)..(9): Table A2; Target 4204; MAGEA4; ENSG00000147381; HLA-C*16:01;
AETSYVKVL

SEQ ID NO: 107047 - protein, 9 aa, Homo sapiens
  misc_feature (1)..(9): Table A2; Target 4205; MAGEA4; ENSG00000147381; HLA-C*16:02;
AETSYVKVL

SEQ ID NO: 107048 - protein, 9 aa, Homo sapiens
  misc_feature (1)..(9): Table A2; Target 4206; MAGEA4; ENSG00000147381; HLA-C*16:04;
AETSYVKVL

SEQ ID NO: 107049 - protein, 8 aa, Homo sapiens
  misc_feature (1)..(8): Table A2; Target 4207; MAGEA4; ENSG00000147381; HLA-A*30:01;
AETSYVKV

SEQ ID NO: 107050 - protein, 8 aa, Homo sapiens
  misc_feature (1)..(8): Table A2; Target 4208; MAGEA4; ENSG00000147381; HLA-B*37:01;
AETSYVKV

SEQ ID NO: 107051 - protein, 8 aa, Homo sapiens
  misc_feature (1)..(8): Table A2; Target 4209; MAGEA4; ENSG00000147381; HLA-B*49:01;
AETSYVKV

SEQ ID NO: 107052 - protein, 10 aa, Homo sapiens
  misc_feature (1)..(10): Table A2; Target 4210; MAGEA4; ENSG00000147381; HLA-B*15:03;
AKELVTKAEM

SEQ ID NO: 107053 - protein, 10 aa, Homo sapiens
  misc_feature (1)..(10): Table A2; Target 4211; MAGEA4; ENSG00000147381; HLA-C*04:01;
AKELVTKAEM

SEQ ID NO: 107054 - protein, 11 aa, Homo sapiens
  misc_feature (1)..(11): Table A2; Target 4212; MAGEA4; ENSG00000147381; HLA-A*02:03;
ALAETSYVKVL

SEQ ID NO: 107055 - protein, 11 aa, Homo sapiens
  misc_feature (1)..(11): Table A2; Target 4213; MAGEA4; ENSG00000147381; HLA-A*02:04;
ALAETSYVKVL

SEQ ID NO: 107056 - protein, 10 aa, Homo sapiens
  misc_feature (1)..(10): Table A2; Target 4214; MAGEA4; ENSG00000147381; HLA-A*02:01;
ALAETSYVKV

SEQ ID NO: 107057 - protein, 10 aa, Homo sapiens
  misc_feature (1)..(10): Table A2; Target 4215; MAGEA4; ENSG00000147381; HLA-A*02:03;
ALAETSYVKV

SEQ ID NO: 107058 - protein, 10 aa, Homo sapiens
  misc_feature (1)..(10): Table A2; Target 4216; MAGEA4; ENSG00000147381; HLA-A*02:04;
ALAETSYVKV

SEQ ID NO: 107059 - protein, 10 aa, Homo sapiens
  misc_feature (1)..(10): Table A2; Target 4217; MAGEA4; ENSG00000147381; HLA-A*02:07;
ALAETSYVKV

SEQ ID NO: 107060 - protein, 10 aa, Homo sapiens
  misc_feature (1)..(10): Table A2; Target 4218; MAGEA4; ENSG00000147381; HLA-B*55:01;
ALAETSYVKV

SEQ ID NO: 107061 - protein, 9 aa, Homo sapiens
  misc_feature (1)..(9): Table A2; Target 4219; MAGEA4; ENSG00000147381; HLA-A*01:01;
ALAETSYVK

SEQ ID NO: 107062 - protein, 9 aa, Homo sapiens
  misc_feature (1)..(9): Table A2; Target 4220; MAGEA4; ENSG00000147381; HLA-A*03:01;
ALAETSYVK

SEQ ID NO: 107063 - protein, 9 aa, Homo sapiens
  misc_feature (1)..(9): Table A2; Target 4221; MAGEA4; ENSG00000147381; HLA-A*03:02;
ALAETSYVK

SEQ ID NO: 107064 - protein, 9 aa, Homo sapiens
  misc_feature (1)..(9): Table A2; Target 4222; MAGEA4; ENSG00000147381; HLA-A*11:01;
ALAETSYVK

SEQ ID NO: 107065 - protein, 9 aa, Homo sapiens
  misc_feature (1)..(9): Table A2; Target 4223; MAGEA4; ENSG00000147381; HLA-A*29:02;
ALAETSYVK

SEQ ID NO: 107066 - protein, 9 aa, Homo sapiens
  misc_feature (1)..(9): Table A2; Target 4224; MAGEA4; ENSG00000147381; HLA-A*68:01;
ALAETSYVK

SEQ ID NO: 107067 - protein, 9 aa, Homo sapiens
  misc_feature (1)..(9): Table A2; Target 4225; MAGEA4; ENSG00000147381; HLA-B*13:02;
ALAETSYVK

SEQ ID NO: 107068 - protein, 9 aa, Homo sapiens
  misc_feature (1)..(9): Table A2; Target 4226; MAGEA4; ENSG00000147381; HLA-B*27:02;
ALAETSYVK

SEQ ID NO: 107069 - protein, 9 aa, Homo sapiens
  misc_feature (1)..(9): Table A2; Target 4227; MAGEA4; ENSG00000147381; HLA-B*27:05;
ALAETSYVK

SEQ ID NO: 107070 - protein, 9 aa, Homo sapiens
  misc_feature (1)..(9): Table A2; Target 4228; MAGEA4; ENSG00000147381; HLA-C*07:06;
ALAETSYVK

SEQ ID NO: 107071 - protein, 8 aa, Homo sapiens
  misc_feature (1)..(8): Table A2; Target 4229; MAGEA4; ENSG00000147381; HLA-A*02:01;
ALAETSYV

SEQ ID NO: 107072 - protein, 8 aa, Homo sapiens
  misc_feature (1)..(8): Table A2; Target 4230; MAGEA4; ENSG00000147381; HLA-A*02:03;
ALAETSYV

SEQ ID NO: 107073 - protein, 8 aa, Homo sapiens
  misc_feature (1)..(8): Table A2; Target 4231; MAGEA4; ENSG00000147381; HLA-B*55:01;
ALAETSYV

SEQ ID NO: 107074 - protein, 9 aa, Homo sapiens
  misc_feature (1)..(9): Table A2; Target 4232; MAGEA4; ENSG00000147381; HLA-A*02:01;
ALGLVGAQA

SEQ ID NO: 107075 - protein, 9 aa, Homo sapiens
  misc_feature (1)..(9): Table A2; Target 4233; MAGEA4; ENSG00000147381; HLA-A*02:03;
ALGLVGAQA

SEQ ID NO: 107076 - protein, 9 aa, Homo sapiens
  misc_feature (1)..(9): Table A2; Target 4234; MAGEA4; ENSG00000147381; HLA-B*56:01;
ALGLVGAQA

SEQ ID NO: 107077 - protein, 9 aa, Homo sapiens
  misc_feature (1)..(9): Table A2; Target 4235; MAGEA4; ENSG00000147381; HLA-A*02:01;
ALLEEEEGV

SEQ ID NO: 107078 - protein, 9 aa, Homo sapiens
  misc_feature (1)..(9): Table A2; Target 4236; MAGEA4; ENSG00000147381; HLA-A*02:03;
ALLEEEEGV

SEQ ID NO: 107079 - protein, 9 aa, Homo sapiens
  misc_feature (1)..(9): Table A2; Target 4237; MAGEA4; ENSG00000147381; HLA-A*02:04;
ALLEEEEGV

SEQ ID NO: 107080 - protein, 9 aa, Homo sapiens
  misc_feature (1)..(9): Table A2; Target 4238; MAGEA4; ENSG00000147381; HLA-A*02:07;
ALLEEEEGV

SEQ ID NO: 107081 - protein, 9 aa, Homo sapiens
  misc_feature (1)..(9): Table A2; Target 4239; MAGEA4; ENSG00000147381; HLA-B*13:02;
ALLEEEEGV

SEQ ID NO: 107082 - protein, 9 aa, Homo sapiens
  misc_feature (1)..(9): Table A2; Target 4240; MAGEA4; ENSG00000147381; HLA-B*55:01;
ALLEEEEGV

SEQ ID NO: 107083 - protein, 11 aa, Homo sapiens
  misc_feature (1)..(11): Table A2; Target 4241; MAGEA4; ENSG00000147381; HLA-A*02:07;
ALPTTISFTCW

SEQ ID NO: 107084 - protein, 11 aa, Homo sapiens
  misc_feature (1)..(11): Table A2; Target 4242; MAGEA4; ENSG00000147381; HLA-A*24:02;
ALPTTISFTCW

SEQ ID NO: 107085 - protein, 8 aa, Homo sapiens
  misc_feature (1)..(8): Table A2; Target 4243; MAGEA4; ENSG00000147381; HLA-A*23:01;
ALPTTISF

SEQ ID NO: 107086 - protein, 8 aa, Homo sapiens
  misc_feature (1)..(8): Table A2; Target 4244; MAGEA4; ENSG00000147381; HLA-B*15:01;
ALPTTISF

SEQ ID NO: 107087 - protein, 8 aa, Homo sapiens
  misc_feature (1)..(8): Table A2; Target 4245; MAGEA4; ENSG00000147381; HLA-B*37:01;
ALPTTISF

SEQ ID NO: 107088 - protein, 8 aa, Homo sapiens
  misc_feature (1)..(8): Table A2; Target 4246; MAGEA4; ENSG00000147381; HLA-B*46:01;
ALPTTISF

SEQ ID NO: 107089 - protein, 8 aa, Homo sapiens
  misc_feature (1)..(8): Table A2; Target 4247; MAGEA4; ENSG00000147381; HLA-C*01:02;
ALPTTISF

SEQ ID NO: 107090 - protein, 8 aa, Homo sapiens
  misc_feature (1)..(8): Table A2; Target 4248; MAGEA4; ENSG00000147381; HLA-C*14:02;
ALPTTISF

SEQ ID NO: 107091 - protein, 9 aa, Homo sapiens
  misc_feature (1)..(9): Table A2; Target 4249; MAGEA4; ENSG00000147381; HLA-A*02:01;
ALSNKVDEL

SEQ ID NO: 107092 - protein, 9 aa, Homo sapiens
  misc_feature (1)..(9): Table A2; Target 4250; MAGEA4; ENSG00000147381; HLA-A*02:03;
ALSNKVDEL

SEQ ID NO: 107093 - protein, 9 aa, Homo sapiens
  misc_feature (1)..(9): Table A2; Target 4251; MAGEA4; ENSG00000147381; HLA-A*02:04;
ALSNKVDEL

SEQ ID NO: 107094 - protein, 9 aa, Homo sapiens
  misc_feature (1)..(9): Table A2; Target 4252; MAGEA4; ENSG00000147381; HLA-A*02:07;
ALSNKVDEL

SEQ ID NO: 107095 - protein, 9 aa, Homo sapiens
  misc_feature (1)..(9): Table A2; Target 4253; MAGEA4; ENSG00000147381; HLA-B*55:01;
ALSNKVDEL

SEQ ID NO: 107096 - protein, 9 aa, Homo sapiens
  misc_feature (1)..(9): Table A2; Target 4254; MAGEA4; ENSG00000147381; HLA-C*01:02;
ALSNKVDEL

SEQ ID NO: 107097 - protein, 9 aa, Homo sapiens
  misc_feature (1)..(9): Table A2; Target 4255; MAGEA4; ENSG00000147381; HLA-C*16:01;
ALSNKVDEL

SEQ ID NO: 107098 - protein, 9 aa, Homo sapiens
  misc_feature (1)..(9): Table A2; Target 4256; MAGEA4; ENSG00000147381; HLA-C*16:02;
ALSNKVDEL

SEQ ID NO: 107099 - protein, 11 aa, Homo sapiens
  misc_feature (1)..(11): Table A2; Target 4257; MAGEA4; ENSG00000147381; HLA-B*56:01;
APTTEEQEAAV

SEQ ID NO: 107100 - protein, 9 aa, Homo sapiens
  misc_feature (1)..(9): Table A2; Target 4258; MAGEA4; ENSG00000147381; HLA-B*35:03;
APTTEEQEA

SEQ ID NO: 107101 - protein, 9 aa, Homo sapiens
  misc_feature (1)..(9): Table A2; Target 4259; MAGEA4; ENSG00000147381; HLA-B*55:01;
APTTEEQEA

SEQ ID NO: 107102 - protein, 9 aa, Homo sapiens
  misc_feature (1)..(9): Table A2; Target 4260; MAGEA4; ENSG00000147381; HLA-B*56:01;
APTTEEQEA

SEQ ID NO: 107103 - protein, 11 aa, Homo sapiens
  misc_feature (1)..(11): Table A2; Target 4261; MAGEA4; ENSG00000147381; HLA-B*27:05;
AQAPTTEEQEA

SEQ ID NO: 107104 - protein, 9 aa, Homo sapiens
  misc_feature (1)..(9): Table A2; Target 4262; MAGEA4; ENSG00000147381; HLA-B*13:02;
AQAPTTEEQ

SEQ ID NO: 107105 - protein, 9 aa, Homo sapiens
  misc_feature (1)..(9): Table A2; Target 4263; MAGEA4; ENSG00000147381; HLA-B*15:01;
AQAPTTEEQ

SEQ ID NO: 107106 - protein, 10 aa, Homo sapiens
  misc_feature (1)..(10): Table A2; Target 4264; MAGEA4; ENSG00000147381; HLA-A*01:01;
ASALPTTISF

SEQ ID NO: 107107 - protein, 10 aa, Homo sapiens
  misc_feature (1)..(10): Table A2; Target 4265; MAGEA4; ENSG00000147381; HLA-B*46:01;
ASALPTTISF

SEQ ID NO: 107108 - protein, 10 aa, Homo sapiens
  misc_feature (1)..(10): Table A2; Target 4266; MAGEA4; ENSG00000147381; HLA-B*57:01;
ASALPTTISF

SEQ ID NO: 107109 - protein, 10 aa, Homo sapiens
  misc_feature (1)..(10): Table A2; Target 4267; MAGEA4; ENSG00000147381; HLA-B*58:01;
ASALPTTISF

SEQ ID NO: 107110 - protein, 10 aa, Homo sapiens
  misc_feature (1)..(10): Table A2; Target 4268; MAGEA4; ENSG00000147381; HLA-C*01:02;
ASALPTTISF

SEQ ID NO: 107111 - protein, 10 aa, Homo sapiens
  misc_feature (1)..(10): Table A2; Target 4269; MAGEA4; ENSG00000147381; HLA-C*04:01;
ASALPTTISF

SEQ ID NO: 107112 - protein, 10 aa, Homo sapiens
  misc_feature (1)..(10): Table A2; Target 4270; MAGEA4; ENSG00000147381; HLA-C*16:01;
ASALPTTISF

SEQ ID NO: 107113 - protein, 10 aa, Homo sapiens
  misc_feature (1)..(10): Table A2; Target 4271; MAGEA4; ENSG00000147381; HLA-C*16:04;
ASALPTTISF

SEQ ID NO: 107114 - protein, 9 aa, Homo sapiens
  misc_feature (1)..(9): Table A2; Target 4272; MAGEA4; ENSG00000147381; HLA-A*01:01;
ASESLKMIF

SEQ ID NO: 107115 - protein, 9 aa, Homo sapiens
  misc_feature (1)..(9): Table A2; Target 4273; MAGEA4; ENSG00000147381; HLA-B*57:01;
ASESLKMIF

SEQ ID NO: 107116 - protein, 9 aa, Homo sapiens
  misc_feature (1)..(9): Table A2; Target 4274; MAGEA4; ENSG00000147381; HLA-B*58:01;
ASESLKMIF

SEQ ID NO: 107117 - protein, 9 aa, Homo sapiens
  misc_feature (1)..(9): Table A2; Target 4275; MAGEA4; ENSG00000147381; HLA-C*12:03;
ASESLKMIF

SEQ ID NO: 107118 - protein, 9 aa, Homo sapiens
  misc_feature (1)..(9): Table A2; Target 4276; MAGEA4; ENSG00000147381; HLA-A*11:01;
ASNTYTLVT

SEQ ID NO: 107119 - protein, 9 aa, Homo sapiens
  misc_feature (1)..(9): Table A2; Target 4277; MAGEA4; ENSG00000147381; HLA-A*02:01;
AVSSSSPLV

SEQ ID NO: 107120 - protein, 9 aa, Homo sapiens
  misc_feature (1)..(9): Table A2; Target 4278; MAGEA4; ENSG00000147381; HLA-A*02:03;
AVSSSSPLV

SEQ ID NO: 107121 - protein, 9 aa, Homo sapiens
  misc_feature (1)..(9): Table A2; Target 4279; MAGEA4; ENSG00000147381; HLA-A*02:07;
AVSSSSPLV

SEQ ID NO: 107122 - protein, 9 aa, Homo sapiens
  misc_feature (1)..(9): Table A2; Target 4280; MAGEA4; ENSG00000147381; HLA-A*03:02;
AVSSSSPLV

SEQ ID NO: 107123 - protein, 9 aa, Homo sapiens
  misc_feature (1)..(9): Table A2; Target 4281; MAGEA4; ENSG00000147381; HLA-A*26:01;
AVSSSSPLV

SEQ ID NO: 107124 - protein, 9 aa, Homo sapiens
  misc_feature (1)..(9): Table A2; Target 4282; MAGEA4; ENSG00000147381; HLA-A*32:01;
AVSSSSPLV

SEQ ID NO: 107125 - protein, 9 aa, Homo sapiens
  misc_feature (1)..(9): Table A2; Target 4283; MAGEA4; ENSG00000147381; HLA-B*13:02;
AVSSSSPLV

SEQ ID NO: 107126 - protein, 9 aa, Homo sapiens
  misc_feature (1)..(9): Table A2; Target 4284; MAGEA4; ENSG00000147381; HLA-B*27:05;
AVSSSSPLV

SEQ ID NO: 107127 - protein, 9 aa, Homo sapiens
  misc_feature (1)..(9): Table A2; Target 4285; MAGEA4; ENSG00000147381; HLA-B*39:01;
AVSSSSPLV

SEQ ID NO: 107128 - protein, 9 aa, Homo sapiens
  misc_feature (1)..(9): Table A2; Target 4286; MAGEA4; ENSG00000147381; HLA-B*55:01;
AVSSSSPLV

SEQ ID NO: 107129 - protein, 9 aa, Homo sapiens
  misc_feature (1)..(9): Table A2; Target 4287; MAGEA4; ENSG00000147381; HLA-C*02:02;
AVSSSSPLV

SEQ ID NO: 107130 - protein, 9 aa, Homo sapiens
  misc_feature (1)..(9): Table A2; Target 4288; MAGEA4; ENSG00000147381; HLA-C*06:02;
AVSSSSPLV

SEQ ID NO: 107131 - protein, 9 aa, Homo sapiens
  misc_feature (1)..(9): Table A2; Target 4289; MAGEA4; ENSG00000147381; HLA-C*16:02;
AVSSSSPLV

SEQ ID NO: 107132 - protein, 8 aa, Homo sapiens
  misc_feature (1)..(8): Table A2; Target 4290; MAGEA4; ENSG00000147381; HLA-C*05:01;
AVSSSSPL

SEQ ID NO: 107133 - protein, 11 aa, Homo sapiens
  misc_feature (1)..(11): Table A2; Target 4291; MAGEA4; ENSG00000147381; HLA-A*24:02;
AYPSLREAALL

SEQ ID NO: 107134 - protein, 10 aa, Homo sapiens
  misc_feature (1)..(10): Table A2; Target 4292; MAGEA4; ENSG00000147381; HLA-A*24:02;
AYPSLREAAL

SEQ ID NO: 107135 - protein, 10 aa, Homo sapiens
  misc_feature (1)..(10): Table A2; Target 4293; MAGEA4; ENSG00000147381; HLA-C*01:02;
AYPSLREAAL

SEQ ID NO: 107136 - protein, 10 aa, Homo sapiens
  misc_feature (1)..(10): Table A2; Target 4294; MAGEA4; ENSG00000147381; HLA-C*14:02;
AYPSLREAAL

SEQ ID NO: 107137 - protein, 9 aa, Homo sapiens
  misc_feature (1)..(9): Table A2; Target 4295; MAGEA4; ENSG00000147381; HLA-B*51:01;
DAESLFREA

SEQ ID NO: 107138 - protein, 9 aa, Homo sapiens
  misc_feature (1)..(9): Table A2; Target 4296; MAGEA4; ENSG00000147381; HLA-B*54:01;
DAESLFREA

SEQ ID NO: 107139 - protein, 11 aa, Homo sapiens
  misc_feature (1)..(11): Table A2; Target 4297; MAGEA4; ENSG00000147381; HLA-B*44:02;
DELAHFLLRKY

SEQ ID NO: 107140 - protein, 9 aa, Homo sapiens
  misc_feature (1)..(9): Table A2; Target 4298; MAGEA4; ENSG00000147381; HLA-A*33:01;
DELAHFLLR

SEQ ID NO: 107141 - protein, 8 aa, Homo sapiens
  misc_feature (1)..(8): Table A2; Target 4299; MAGEA4; ENSG00000147381; HLA-B*18:01;
DELAHFLL

SEQ ID NO: 107142 - protein, 8 aa, Homo sapiens
  misc_feature (1)..(8): Table A2; Target 4300; MAGEA4; ENSG00000147381; HLA-B*37:01;
DELAHFLL

SEQ ID NO: 107143 - protein, 8 aa, Homo sapiens
  misc_feature (1)..(8): Table A2; Target 4301; MAGEA4; ENSG00000147381; HLA-B*40:02;
DELAHFLL

SEQ ID NO: 107144 - protein, 8 aa, Homo sapiens
  misc_feature (1)..(8): Table A2; Target 4302; MAGEA4; ENSG00000147381; HLA-B*44:02;
DELAHFLL

SEQ ID NO: 107145 - protein, 9 aa, Homo sapiens
  misc_feature (1)..(9): Table A2; Target 4303; MAGEA4; ENSG00000147381; HLA-B*51:01;
DGLLGNNQI

SEQ ID NO: 107146 - protein, 8 aa, Homo sapiens
  misc_feature (1)..(8): Table A2; Target 4304; MAGEA4; ENSG00000147381; HLA-B*08:01;
DGREHTVY

SEQ ID NO: 107147 - protein, 8 aa, Homo sapiens
  misc_feature (1)..(8): Table A2; Target 4305; MAGEA4; ENSG00000147381; HLA-B*18:01;
DGREHTVY

SEQ ID NO: 107148 - protein, 10 aa, Homo sapiens
  misc_feature (1)..(10): Table A2; Target 4306; MAGEA4; ENSG00000147381; HLA-A*68:01;
DPASNTYTLV

SEQ ID NO: 107149 - protein, 10 aa, Homo sapiens
  misc_feature (1)..(10): Table A2; Target 4307; MAGEA4; ENSG00000147381; HLA-B*51:01;
DPASNTYTLV

SEQ ID NO: 107150 - protein, 9 aa, Homo sapiens
  misc_feature (1)..(9): Table A2; Target 4308; MAGEA4; ENSG00000147381; HLA-A*23:01;
DPASNTYTL

SEQ ID NO: 107151 - protein, 9 aa, Homo sapiens
  misc_feature (1)..(9): Table A2; Target 4309; MAGEA4; ENSG00000147381; HLA-A*68:01;
DPASNTYTL

SEQ ID NO: 107152 - protein, 9 aa, Homo sapiens
  misc_feature (1)..(9): Table A2; Target 4310; MAGEA4; ENSG00000147381; HLA-B*07:02;
DPASNTYTL

SEQ ID NO: 107153 - protein, 9 aa, Homo sapiens
  misc_feature (1)..(9): Table A2; Target 4311; MAGEA4; ENSG00000147381; HLA-B*35:01;
DPASNTYTL

SEQ ID NO: 107154 - protein, 9 aa, Homo sapiens
  misc_feature (1)..(9): Table A2; Target 4312; MAGEA4; ENSG00000147381; HLA-B*35:03;
DPASNTYTL

SEQ ID NO: 107155 - protein, 9 aa, Homo sapiens
  misc_feature (1)..(9): Table A2; Target 4313; MAGEA4; ENSG00000147381; HLA-B*38:01;
DPASNTYTL

SEQ ID NO: 107156 - protein, 9 aa, Homo sapiens
  misc_feature (1)..(9): Table A2; Target 4314; MAGEA4; ENSG00000147381; HLA-B*39:01;
DPASNTYTL

SEQ ID NO: 107157 - protein, 9 aa, Homo sapiens
  misc_feature (1)..(9): Table A2; Target 4315; MAGEA4; ENSG00000147381; HLA-B*51:01;
DPASNTYTL

SEQ ID NO: 107158 - protein, 9 aa, Homo sapiens
  misc_feature (1)..(9): Table A2; Target 4316; MAGEA4; ENSG00000147381; HLA-B*55:01;
DPASNTYTL

SEQ ID NO: 107159 - protein, 9 aa, Homo sapiens
  misc_feature (1)..(9): Table A2; Target 4317; MAGEA4; ENSG00000147381; HLA-B*56:01;
DPASNTYTL

SEQ ID NO: 107160 - protein, 9 aa, Homo sapiens
  misc_feature (1)..(9): Table A2; Target 4318; MAGEA4; ENSG00000147381; HLA-C*07:02;
DPASNTYTL

SEQ ID NO: 107161 - protein, 10 aa, Homo sapiens
  misc_feature (1)..(10): Table A2; Target 4319; MAGEA4; ENSG00000147381; HLA-A*25:01;
DVKEVDPASN

SEQ ID NO: 107162 - protein, 10 aa, Homo sapiens
  misc_feature (1)..(10): Table A2; Target 4320; MAGEA4; ENSG00000147381; HLA-A*26:01;
DVKEVDPASN

SEQ ID NO: 107163 - protein, 10 aa, Homo sapiens
  misc_feature (1)..(10): Table A2; Target 4321; MAGEA4; ENSG00000147381; HLA-A*33:01;
DVKEVDPASN

SEQ ID NO: 107164 - protein, 10 aa, Homo sapiens
  misc_feature (1)..(10): Table A2; Target 4322; MAGEA4; ENSG00000147381; HLA-A*68:01;
DVKEVDPASN

SEQ ID NO: 107165 - protein, 10 aa, Homo sapiens
  misc_feature (1)..(10): Table A2; Target 4323; MAGEA4; ENSG00000147381; HLA-A*33:03;
EALGLVGAQA

SEQ ID NO: 107166 - protein, 10 aa, Homo sapiens
  misc_feature (1)..(10): Table A2; Target 4324; MAGEA4; ENSG00000147381; HLA-B*54:01;
EALGLVGAQA

SEQ ID NO: 107167 - protein, 10 aa, Homo sapiens
  misc_feature (1)..(10): Table A2; Target 4325; MAGEA4; ENSG00000147381; HLA-C*07:06;
EALGLVGAQA

SEQ ID NO: 107168 - protein, 9 aa, Homo sapiens
  misc_feature (1)..(9): Table A2; Target 4326; MAGEA4; ENSG00000147381; HLA-A*26:01;
EALGLVGAQ

SEQ ID NO: 107169 - protein, 9 aa, Homo sapiens
  misc_feature (1)..(9): Table A2; Target 4327; MAGEA4; ENSG00000147381; HLA-A*33:01;
EALGLVGAQ

SEQ ID NO: 107170 - protein, 9 aa, Homo sapiens
  misc_feature (1)..(9): Table A2; Target 4328; MAGEA4; ENSG00000147381; HLA-A*33:03;
EALGLVGAQ

SEQ ID NO: 107171 - protein, 9 aa, Homo sapiens
  misc_feature (1)..(9): Table A2; Target 4329; MAGEA4; ENSG00000147381; HLA-C*04:01;
EALGLVGAQ

SEQ ID NO: 107172 - protein, 9 aa, Homo sapiens
  misc_feature (1)..(9): Table A2; Target 4330; MAGEA4; ENSG00000147381; HLA-C*07:01;
EALGLVGAQ

SEQ ID NO: 107173 - protein, 9 aa, Homo sapiens
  misc_feature (1)..(9): Table A2; Target 4331; MAGEA4; ENSG00000147381; HLA-C*12:03;
EALGLVGAQ

SEQ ID NO: 107174 - protein, 8 aa, Homo sapiens
  misc_feature (1)..(8): Table A2; Target 4332; MAGEA4; ENSG00000147381; HLA-B*54:01;
EALGLVGA

SEQ ID NO: 107175 - protein, 9 aa, Homo sapiens
  misc_feature (1)..(9): Table A2; Target 4333; MAGEA4; ENSG00000147381; HLA-B*35:03;
EAQEEALGL

SEQ ID NO: 107176 - protein, 9 aa, Homo sapiens
  misc_feature (1)..(9): Table A2; Target 4334; MAGEA4; ENSG00000147381; HLA-C*07:06;
EAQEEALGL

SEQ ID NO: 107177 - protein, 11 aa, Homo sapiens
  misc_feature (1)..(11): Table A2; Target 4335; MAGEA4; ENSG00000147381; HLA-B*44:03;
EEALGLVGAQA

SEQ ID NO: 107178 - protein, 9 aa, Homo sapiens
  misc_feature (1)..(9): Table A2; Target 4336; MAGEA4; ENSG00000147381; HLA-A*30:01;
EEALGLVGA

SEQ ID NO: 107179 - protein, 9 aa, Homo sapiens
  misc_feature (1)..(9): Table A2; Target 4337; MAGEA4; ENSG00000147381; HLA-B*18:01;
EEALGLVGA

SEQ ID NO: 107180 - protein, 9 aa, Homo sapiens
  misc_feature (1)..(9): Table A2; Target 4338; MAGEA4; ENSG00000147381; HLA-B*40:02;
EEALGLVGA

SEQ ID NO: 107181 - protein, 9 aa, Homo sapiens
  misc_feature (1)..(9): Table A2; Target 4339; MAGEA4; ENSG00000147381; HLA-B*49:01;
EEALGLVGA

SEQ ID NO: 107182 - protein, 11 aa, Homo sapiens
  misc_feature (1)..(11): Table A2; Target 4340; MAGEA4; ENSG00000147381; HLA-B*39:01;
EEEGPSTSPDA

SEQ ID NO: 107183 - protein, 9 aa, Homo sapiens
  misc_feature (1)..(9): Table A2; Target 4341; MAGEA4; ENSG00000147381; HLA-B*39:01;
EEEGPSTSP

SEQ ID NO: 107184 - protein, 9 aa, Homo sapiens
  misc_feature (1)..(9): Table A2; Target 4342; MAGEA4; ENSG00000147381; HLA-B*49:01;
EEIWEELGV

SEQ ID NO: 107185 - protein, 9 aa, Homo sapiens
  misc_feature (1)..(9): Table A2; Target 4343; MAGEA4; ENSG00000147381; HLA-A*25:01;
EELGVMGVY

SEQ ID NO: 107186 - protein, 9 aa, Homo sapiens
  misc_feature (1)..(9): Table A2; Target 4344; MAGEA4; ENSG00000147381; HLA-A*26:01;
EELGVMGVY

SEQ ID NO: 107187 - protein, 9 aa, Homo sapiens
  misc_feature (1)..(9): Table A2; Target 4345; MAGEA4; ENSG00000147381; HLA-A*30:02;
EELGVMGVY

SEQ ID NO: 107188 - protein, 9 aa, Homo sapiens
  misc_feature (1)..(9): Table A2; Target 4346; MAGEA4; ENSG00000147381; HLA-B*15:03;
EELGVMGVY

SEQ ID NO: 107189 - protein, 9 aa, Homo sapiens
  misc_feature (1)..(9): Table A2; Target 4347; MAGEA4; ENSG00000147381; HLA-B*18:01;
EELGVMGVY

SEQ ID NO: 107190 - protein, 9 aa, Homo sapiens
  misc_feature (1)..(9): Table A2; Target 4348; MAGEA4; ENSG00000147381; HLA-B*27:02;
EELGVMGVY

SEQ ID NO: 107191 - protein, 9 aa, Homo sapiens
  misc_feature (1)..(9): Table A2; Target 4349; MAGEA4; ENSG00000147381; HLA-B*40:01;
EELGVMGVY

SEQ ID NO: 107192 - protein, 9 aa, Homo sapiens
  misc_feature (1)..(9): Table A2; Target 4350; MAGEA4; ENSG00000147381; HLA-B*44:02;
EELGVMGVY

SEQ ID NO: 107193 - protein, 9 aa, Homo sapiens
  misc_feature (1)..(9): Table A2; Target 4351; MAGEA4; ENSG00000147381; HLA-B*44:03;
EELGVMGVY

SEQ ID NO: 107194 - protein, 9 aa, Homo sapiens
  misc_feature (1)..(9): Table A2; Target 4352; MAGEA4; ENSG00000147381; HLA-C*16:04;
EELGVMGVY

SEQ ID NO: 107195 - protein, 8 aa, Homo sapiens
  misc_feature (1)..(8): Table A2; Target 4353; MAGEA4; ENSG00000147381; HLA-B*18:01;
EELGVMGV

SEQ ID NO: 107196 - protein, 8 aa, Homo sapiens
  misc_feature (1)..(8): Table A2; Target 4354; MAGEA4; ENSG00000147381; HLA-B*37:01;
EELGVMGV

SEQ ID NO: 107197 - protein, 8 aa, Homo sapiens
  misc_feature (1)..(8): Table A2; Target 4355; MAGEA4; ENSG00000147381; HLA-B*40:02;
EELGVMGV

SEQ ID NO: 107198 - protein, 8 aa, Homo sapiens
  misc_feature (1)..(8): Table A2; Target 4356; MAGEA4; ENSG00000147381; HLA-B*49:01;
EELGVMGV

SEQ ID NO: 107199 - protein, 9 aa, Homo sapiens
  misc_feature (1)..(9): Table A2; Target 4357; MAGEA4; ENSG00000147381; HLA-A*30:01;
EEVPAAESA

SEQ ID NO: 107200 - protein, 9 aa, Homo sapiens
  misc_feature (1)..(9): Table A2; Target 4358; MAGEA4; ENSG00000147381; HLA-B*18:01;
EEVPAAESA

SEQ ID NO: 107201 - protein, 9 aa, Homo sapiens
  misc_feature (1)..(9): Table A2; Target 4359; MAGEA4; ENSG00000147381; HLA-B*40:01;
EEVPAAESA

SEQ ID NO: 107202 - protein, 9 aa, Homo sapiens
  misc_feature (1)..(9): Table A2; Target 4360; MAGEA4; ENSG00000147381; HLA-B*40:02;
EEVPAAESA

SEQ ID NO: 107203 - protein, 9 aa, Homo sapiens
  misc_feature (1)..(9): Table A2; Target 4361; MAGEA4; ENSG00000147381; HLA-B*49:01;
EEVPAAESA

SEQ ID NO: 107204 - protein, 9 aa, Homo sapiens
  misc_feature (1)..(9): Table A2; Target 4362; MAGEA4; ENSG00000147381; HLA-A*33:01;
EHTVYGEPR

SEQ ID NO: 107205 - protein, 9 aa, Homo sapiens
  misc_feature (1)..(9): Table A2; Target 4363; MAGEA4; ENSG00000147381; HLA-A*33:03;
EHTVYGEPR

SEQ ID NO: 107206 - protein, 9 aa, Homo sapiens
  misc_feature (1)..(9): Table A2; Target 4364; MAGEA4; ENSG00000147381; HLA-A*33:03;
EHVVRVNAR

SEQ ID NO: 107207 - protein, 11 aa, Homo sapiens
  misc_feature (1)..(11): Table A2; Target 4365; MAGEA4; ENSG00000147381; HLA-A*68:02;
EIWEELGVMGV

SEQ ID NO: 107208 - protein, 8 aa, Homo sapiens
  misc_feature (1)..(8): Table A2; Target 4366; MAGEA4; ENSG00000147381; HLA-A*25:01;
ELGVMGVY

SEQ ID NO: 107209 - protein, 8 aa, Homo sapiens
  misc_feature (1)..(8): Table A2; Target 4367; MAGEA4; ENSG00000147381; HLA-A*26:01;
ELGVMGVY

SEQ ID NO: 107210 - protein, 8 aa, Homo sapiens
  misc_feature (1)..(8): Table A2; Target 4368; MAGEA4; ENSG00000147381; HLA-B*15:01;
ELGVMGVY

SEQ ID NO: 107211 - protein, 8 aa, Homo sapiens
  misc_feature (1)..(8): Table A2; Target 4369; MAGEA4; ENSG00000147381; HLA-C*07:01;
ELGVMGVY

SEQ ID NO: 107212 - protein, 8 aa, Homo sapiens
  misc_feature (1)..(8): Table A2; Target 4370; MAGEA4; ENSG00000147381; HLA-C*07:04;
ELGVMGVY

SEQ ID NO: 107213 - protein, 11 aa, Homo sapiens
  misc_feature (1)..(11): Table A2; Target 4371; MAGEA4; ENSG00000147381; HLA-A*33:01;
ELVTKAEMLER

SEQ ID NO: 107214 - protein, 9 aa, Homo sapiens
  misc_feature (1)..(9): Table A2; Target 4372; MAGEA4; ENSG00000147381; HLA-A*25:01;
ELVTKAEML

SEQ ID NO: 107215 - protein, 9 aa, Homo sapiens
  misc_feature (1)..(9): Table A2; Target 4373; MAGEA4; ENSG00000147381; HLA-A*26:01;
ELVTKAEML

SEQ ID NO: 107216 - protein, 9 aa, Homo sapiens
  misc_feature (1)..(9): Table A2; Target 4374; MAGEA4; ENSG00000147381; HLA-B*08:01;
ELVTKAEML

SEQ ID NO: 107217 - protein, 8 aa, Homo sapiens
  misc_feature (1)..(8): Table A2; Target 4375; MAGEA4; ENSG00000147381; HLA-B*08:01;
ELVTKAEM

SEQ ID NO: 107218 - protein, 10 aa, Homo sapiens
  misc_feature (1)..(10): Table A2; Target 4376; MAGEA4; ENSG00000147381; HLA-A*25:01;
EMLERVIKNY

SEQ ID NO: 107219 - protein, 10 aa, Homo sapiens
  misc_feature (1)..(10): Table A2; Target 4377; MAGEA4; ENSG00000147381; HLA-B*44:02;
EMLERVIKNY

SEQ ID NO: 107220 - protein, 9 aa, Homo sapiens
  misc_feature (1)..(9): Table A2; Target 4378; MAGEA4; ENSG00000147381; HLA-B*39:01;
ESAGPPQSP

SEQ ID NO: 107221 - protein, 11 aa, Homo sapiens
  misc_feature (1)..(11): Table A2; Target 4379; MAGEA4; ENSG00000147381; HLA-A*33:01;
ESLFREALSNK

SEQ ID NO: 107222 - protein, 8 aa, Homo sapiens
  misc_feature (1)..(8): Table A2; Target 4380; MAGEA4; ENSG00000147381; HLA-B*08:01;
ESLFREAL

SEQ ID NO: 107223 - protein, 11 aa, Homo sapiens
  misc_feature (1)..(11): Table A2; Target 4381; MAGEA4; ENSG00000147381; HLA-A*68:02;
ETSYVKVLEHV

SEQ ID NO: 107224 - protein, 10 aa, Homo sapiens
  misc_feature (1)..(10): Table A2; Target 4382; MAGEA4; ENSG00000147381; HLA-A*68:01;
ETSYVKVLEH

SEQ ID NO: 107225 - protein, 9 aa, Homo sapiens
  misc_feature (1)..(9): Table A2; Target 4383; MAGEA4; ENSG00000147381; HLA-A*68:02;
ETSYVKVLE

SEQ ID NO: 107226 - protein, 11 aa, Homo sapiens
  misc_feature (1)..(11): Table A2; Target 4384; MAGEA4; ENSG00000147381; HLA-A*01:01;
EVDPASNTYTL

SEQ ID NO: 107227 - protein, 11 aa, Homo sapiens
  misc_feature (1)..(11): Table A2; Target 4385; MAGEA4; ENSG00000147381; HLA-A*02:07;
EVDPASNTYTL

SEQ ID NO: 107228 - protein, 11 aa, Homo sapiens
  misc_feature (1)..(11): Table A2; Target 4386; MAGEA4; ENSG00000147381; HLA-A*25:01;
EVDPASNTYTL

SEQ ID NO: 107229 - protein, 11 aa, Homo sapiens
  misc_feature (1)..(11): Table A2; Target 4387; MAGEA4; ENSG00000147381; HLA-A*26:01;
EVDPASNTYTL

SEQ ID NO: 107230 - protein, 11 aa, Homo sapiens
  misc_feature (1)..(11): Table A2; Target 4388; MAGEA4; ENSG00000147381; HLA-A*33:03;
EVDPASNTYTL

SEQ ID NO: 107231 - protein, 11 aa, Homo sapiens
  misc_feature (1)..(11): Table A2; Target 4389; MAGEA4; ENSG00000147381; HLA-A*68:01;
EVDPASNTYTL

SEQ ID NO: 107232 - protein, 11 aa, Homo sapiens
  misc_feature (1)..(11): Table A2; Target 4390; MAGEA4; ENSG00000147381; HLA-A*68:02;
EVDPASNTYTL

SEQ ID NO: 107233 - protein, 11 aa, Homo sapiens
  misc_feature (1)..(11): Table A2; Target 4391; MAGEA4; ENSG00000147381; HLA-B*27:05;
EVDPASNTYTL

SEQ ID NO: 107234 - protein, 11 aa, Homo sapiens
  misc_feature (1)..(11): Table A2; Target 4392; MAGEA4; ENSG00000147381; HLA-B*35:03;
EVDPASNTYTL

SEQ ID NO: 107235 - protein, 11 aa, Homo sapiens
  misc_feature (1)..(11): Table A2; Target 4393; MAGEA4; ENSG00000147381; HLA-B*38:01;
EVDPASNTYTL

SEQ ID NO: 107236 - protein, 11 aa, Homo sapiens
  misc_feature (1)..(11): Table A2; Target 4394; MAGEA4; ENSG00000147381; HLA-B*39:01;
EVDPASNTYTL

SEQ ID NO: 107237 - protein, 11 aa, Homo sapiens
  misc_feature (1)..(11): Table A2; Target 4395; MAGEA4; ENSG00000147381; HLA-B*40:01;
EVDPASNTYTL

SEQ ID NO: 107238 - protein, 11 aa, Homo sapiens
  misc_feature (1)..(11): Table A2; Target 4396; MAGEA4; ENSG00000147381; HLA-C*05:01;
EVDPASNTYTL

SEQ ID NO: 107239 - protein, 11 aa, Homo sapiens
  misc_feature (1)..(11): Table A2; Target 4397; MAGEA4; ENSG00000147381; HLA-C*07:06;
EVDPASNTYTL

SEQ ID NO: 107240 - protein, 9 aa, Homo sapiens
  misc_feature (1)..(9): Table A2; Target 4398; MAGEA4; ENSG00000147381; HLA-A*01:01;
EVDPASNTY

SEQ ID NO: 107241 - protein, 9 aa, Homo sapiens
  misc_feature (1)..(9): Table A2; Target 4399; MAGEA4; ENSG00000147381; HLA-A*25:01;
EVDPASNTY

SEQ ID NO: 107242 - protein, 9 aa, Homo sapiens
  misc_feature (1)..(9): Table A2; Target 4400; MAGEA4; ENSG00000147381; HLA-A*26:01;
EVDPASNTY

SEQ ID NO: 107243 - protein, 9 aa, Homo sapiens
  misc_feature (1)..(9): Table A2; Target 4401; MAGEA4; ENSG00000147381; HLA-A*29:02;
EVDPASNTY

SEQ ID NO: 107244 - protein, 9 aa, Homo sapiens
  misc_feature (1)..(9): Table A2; Target 4402; MAGEA4; ENSG00000147381; HLA-A*30:02;
EVDPASNTY

SEQ ID NO: 107245 - protein, 9 aa, Homo sapiens
  misc_feature (1)..(9): Table A2; Target 4403; MAGEA4; ENSG00000147381; HLA-A*32:01;
EVDPASNTY

SEQ ID NO: 107246 - protein, 9 aa, Homo sapiens
  misc_feature (1)..(9): Table A2; Target 4404; MAGEA4; ENSG00000147381; HLA-A*33:03;
EVDPASNTY

SEQ ID NO: 107247 - protein, 9 aa, Homo sapiens
  misc_feature (1)..(9): Table A2; Target 4405; MAGEA4; ENSG00000147381; HLA-A*68:01;
EVDPASNTY

SEQ ID NO: 107248 - protein, 9 aa, Homo sapiens
  misc_feature (1)..(9): Table A2; Target 4406; MAGEA4; ENSG00000147381; HLA-B*15:01;
EVDPASNTY

SEQ ID NO: 107249 - protein, 9 aa, Homo sapiens
  misc_feature (1)..(9): Table A2; Target 4407; MAGEA4; ENSG00000147381; HLA-B*15:03;
EVDPASNTY

SEQ ID NO: 107250 - protein, 9 aa, Homo sapiens
  misc_feature (1)..(9): Table A2; Target 4408; MAGEA4; ENSG00000147381; HLA-B*18:01;
EVDPASNTY

SEQ ID NO: 107251 - protein, 9 aa, Homo sapiens
  misc_feature (1)..(9): Table A2; Target 4409; MAGEA4; ENSG00000147381; HLA-B*35:01;
EVDPASNTY

SEQ ID NO: 107252 - protein, 9 aa, Homo sapiens
  misc_feature (1)..(9): Table A2; Target 4410; MAGEA4; ENSG00000147381; HLA-B*38:01;
EVDPASNTY

SEQ ID NO: 107253 - protein, 9 aa, Homo sapiens
  misc_feature (1)..(9): Table A2; Target 4411; MAGEA4; ENSG00000147381; HLA-B*39:01;
EVDPASNTY

SEQ ID NO: 107254 - protein, 9 aa, Homo sapiens
  misc_feature (1)..(9): Table A2; Target 4412; MAGEA4; ENSG00000147381; HLA-B*44:03;
EVDPASNTY

SEQ ID NO: 107255 - protein, 9 aa, Homo sapiens
  misc_feature (1)..(9): Table A2; Target 4413; MAGEA4; ENSG00000147381; HLA-B*46:01;
EVDPASNTY

SEQ ID NO: 107256 - protein, 9 aa, Homo sapiens
  misc_feature (1)..(9): Table A2; Target 4414; MAGEA4; ENSG00000147381; HLA-B*55:01;
EVDPASNTY

SEQ ID NO: 107257 - protein, 9 aa, Homo sapiens
  misc_feature (1)..(9): Table A2; Target 4415; MAGEA4; ENSG00000147381; HLA-B*58:01;
EVDPASNTY

SEQ ID NO: 107258 - protein, 9 aa, Homo sapiens
  misc_feature (1)..(9): Table A2; Target 4416; MAGEA4; ENSG00000147381; HLA-C*02:02;
EVDPASNTY

SEQ ID NO: 107259 - protein, 9 aa, Homo sapiens
  misc_feature (1)..(9): Table A2; Target 4417; MAGEA4; ENSG00000147381; HLA-C*03:03;
EVDPASNTY

SEQ ID NO: 107260 - protein, 9 aa, Homo sapiens
  misc_feature (1)..(9): Table A2; Target 4418; MAGEA4; ENSG00000147381; HLA-C*05:01;
EVDPASNTY

SEQ ID NO: 107261 - protein, 9 aa, Homo sapiens
  misc_feature (1)..(9): Table A2; Target 4419; MAGEA4; ENSG00000147381; HLA-C*07:04;
EVDPASNTY

SEQ ID NO: 107262 - protein, 9 aa, Homo sapiens
  misc_feature (1)..(9): Table A2; Target 4420; MAGEA4; ENSG00000147381; HLA-C*07:06;
EVDPASNTY

SEQ ID NO: 107263 - protein, 9 aa, Homo sapiens
  misc_feature (1)..(9): Table A2; Target 4421; MAGEA4; ENSG00000147381; HLA-C*12:03;
EVDPASNTY

SEQ ID NO: 107264 - protein, 9 aa, Homo sapiens
  misc_feature (1)..(9): Table A2; Target 4422; MAGEA4; ENSG00000147381; HLA-C*16:02;
EVDPASNTY

SEQ ID NO: 107265 - protein, 9 aa, Homo sapiens
  misc_feature (1)..(9): Table A2; Target 4423; MAGEA4; ENSG00000147381; HLA-C*16:04;
EVDPASNTY

SEQ ID NO: 107266 - protein, 10 aa, Homo sapiens
  misc_feature (1)..(10): Table A2; Target 4424; MAGEA4; ENSG00000147381; HLA-A*26:01;
EVPAAESAGP

SEQ ID NO: 107267 - protein, 10 aa, Homo sapiens
  misc_feature (1)..(10): Table A2; Target 4425; MAGEA4; ENSG00000147381; HLA-A*33:03;
EYRQVPGSNP

SEQ ID NO: 107268 - protein, 8 aa, Homo sapiens
  misc_feature (1)..(8): Table A2; Target 4426; MAGEA4; ENSG00000147381; HLA-B*46:01;
FGIDVKEV

SEQ ID NO: 107269 - protein, 8 aa, Homo sapiens
  misc_feature (1)..(8): Table A2; Target 4427; MAGEA4; ENSG00000147381; HLA-B*49:01;
FGIDVKEV

SEQ ID NO: 107270 - protein, 8 aa, Homo sapiens
  misc_feature (1)..(8): Table A2; Target 4428; MAGEA4; ENSG00000147381; HLA-B*51:01;
FGIDVKEV

SEQ ID NO: 107271 - protein, 8 aa, Homo sapiens
  misc_feature (1)..(8): Table A2; Target 4429; MAGEA4; ENSG00000147381; HLA-C*02:02;
FGIDVKEV

SEQ ID NO: 107272 - protein, 8 aa, Homo sapiens
  misc_feature (1)..(8): Table A2; Target 4430; MAGEA4; ENSG00000147381; HLA-C*03:04;
FGIDVKEV

SEQ ID NO: 107273 - protein, 8 aa, Homo sapiens
  misc_feature (1)..(8): Table A2; Target 4431; MAGEA4; ENSG00000147381; HLA-C*12:03;
FGIDVKEV

SEQ ID NO: 107274 - protein, 8 aa, Homo sapiens
  misc_feature (1)..(8): Table A2; Target 4432; MAGEA4; ENSG00000147381; HLA-C*16:02;
FGIDVKEV

SEQ ID NO: 107275 - protein, 9 aa, Homo sapiens
  misc_feature (1)..(9): Table A2; Target 4433; MAGEA4; ENSG00000147381; HLA-C*07:02;
FGKASESLK

SEQ ID NO: 107276 - protein, 8 aa, Homo sapiens
  misc_feature (1)..(8): Table A2; Target 4434; MAGEA4; ENSG00000147381; HLA-B*46:01;
FGKASESL

SEQ ID NO: 107277 - protein, 8 aa, Homo sapiens
  misc_feature (1)..(8): Table A2; Target 4435; MAGEA4; ENSG00000147381; HLA-C*03:04;
FGKASESL

SEQ ID NO: 107278 - protein, 8 aa, Homo sapiens
  misc_feature (1)..(8): Table A2; Target 4436; MAGEA4; ENSG00000147381; HLA-C*14:02;
FGKASESL

SEQ ID NO: 107279 - protein, 11 aa, Homo sapiens
  misc_feature (1)..(11): Table A2; Target 4437; MAGEA4; ENSG00000147381; HLA-A*02:01;
FLWGPRALAET

SEQ ID NO: 107280 - protein, 11 aa, Homo sapiens
  misc_feature (1)..(11): Table A2; Target 4438; MAGEA4; ENSG00000147381; HLA-A*02:03;
FLWGPRALAET

SEQ ID NO: 107281 - protein, 11 aa, Homo sapiens
  misc_feature (1)..(11): Table A2; Target 4439; MAGEA4; ENSG00000147381; HLA-A*02:04;
FLWGPRALAET

SEQ ID NO: 107282 - protein, 11 aa, Homo sapiens
  misc_feature (1)..(11): Table A2; Target 4440; MAGEA4; ENSG00000147381; HLA-A*02:07;
FLWGPRALAET

SEQ ID NO: 107283 - protein, 9 aa, Homo sapiens
  misc_feature (1)..(9): Table A2; Target 4441; MAGEA4; ENSG00000147381; HLA-A*02:01;
FLWGPRALA

SEQ ID NO: 107284 - protein, 8 aa, Homo sapiens
  misc_feature (1)..(8): Table A2; Target 4442; MAGEA4; ENSG00000147381; HLA-A*02:04;
FLWGPRAL

SEQ ID NO: 107285 - protein, 9 aa, Homo sapiens
  misc_feature (1)..(9): Table A2; Target 4443; MAGEA4; ENSG00000147381; HLA-B*51:01;
FPKTGLLII

SEQ ID NO: 107286 - protein, 9 aa, Homo sapiens
  misc_feature (1)..(9): Table A2; Target 4444; MAGEA4; ENSG00000147381; HLA-B*54:01;
FPKTGLLII

SEQ ID NO: 107287 - protein, 8 aa, Homo sapiens
  misc_feature (1)..(8): Table A2; Target 4445; MAGEA4; ENSG00000147381; HLA-B*51:01;
FPKTGLLI

SEQ ID NO: 107288 - protein, 9 aa, Homo sapiens
  misc_feature (1)..(9): Table A2; Target 4446; MAGEA4; ENSG00000147381; HLA-B*54:01;
FPVIFGKAS

SEQ ID NO: 107289 - protein, 8 aa, Homo sapiens
  misc_feature (1)..(8): Table A2; Target 4447; MAGEA4; ENSG00000147381; HLA-B*54:01;
FPVIFGKA

SEQ ID NO: 107290 - protein, 8 aa, Homo sapiens
  misc_feature (1)..(8): Table A2; Target 4448; MAGEA4; ENSG00000147381; HLA-B*55:01;
FPVIFGKA

SEQ ID NO: 107291 - protein, 8 aa, Homo sapiens
  misc_feature (1)..(8): Table A2; Target 4449; MAGEA4; ENSG00000147381; HLA-B*56:01;
FPVIFGKA

SEQ ID NO: 107292 - protein, 9 aa, Homo sapiens
  misc_feature (1)..(9): Table A2; Target 4450; MAGEA4; ENSG00000147381; HLA-C*06:02;
FREALSNKV

SEQ ID NO: 107293 - protein, 9 aa, Homo sapiens
  misc_feature (1)..(9): Table A2; Target 4451; MAGEA4; ENSG00000147381; HLA-B*13:02;
GASALPTTI

SEQ ID NO: 107294 - protein, 9 aa, Homo sapiens
  misc_feature (1)..(9): Table A2; Target 4452; MAGEA4; ENSG00000147381; HLA-B*15:03;
GASALPTTI

SEQ ID NO: 107295 - protein, 9 aa, Homo sapiens
  misc_feature (1)..(9): Table A2; Target 4453; MAGEA4; ENSG00000147381; HLA-B*49:01;
GASALPTTI

SEQ ID NO: 107296 - protein, 9 aa, Homo sapiens
  misc_feature (1)..(9): Table A2; Target 4454; MAGEA4; ENSG00000147381; HLA-B*51:01;
GASALPTTI

SEQ ID NO: 107297 - protein, 9 aa, Homo sapiens
  misc_feature (1)..(9): Table A2; Target 4455; MAGEA4; ENSG00000147381; HLA-B*58:01;
GASALPTTI

SEQ ID NO: 107298 - protein, 9 aa, Homo sapiens
  misc_feature (1)..(9): Table A2; Target 4456; MAGEA4; ENSG00000147381; HLA-C*02:02;
GASALPTTI

SEQ ID NO: 107299 - protein, 9 aa, Homo sapiens
  misc_feature (1)..(9): Table A2; Target 4457; MAGEA4; ENSG00000147381; HLA-C*12:03;
GASALPTTI

SEQ ID NO: 107300 - protein, 9 aa, Homo sapiens
  misc_feature (1)..(9): Table A2; Target 4458; MAGEA4; ENSG00000147381; HLA-C*16:02;
GASALPTTI

SEQ ID NO: 107301 - protein, 9 aa, Homo sapiens
  misc_feature (1)..(9): Table A2; Target 4459; MAGEA4; ENSG00000147381; HLA-C*16:04;
GASALPTTI

SEQ ID NO: 107302 - protein, 9 aa, Homo sapiens
  misc_feature (1)..(9): Table A2; Target 4460; MAGEA4; ENSG00000147381; HLA-B*15:03;
GKASESLKM

SEQ ID NO: 107303 - protein, 11 aa, Homo sapiens
  misc_feature (1)..(11): Table A2; Target 4461; MAGEA4; ENSG00000147381; HLA-A*03:01;
GLLGNNQIFPK

SEQ ID NO: 107304 - protein, 11 aa, Homo sapiens
  misc_feature (1)..(11): Table A2; Target 4462; MAGEA4; ENSG00000147381; HLA-A*03:02;
GLLGNNQIFPK

SEQ ID NO: 107305 - protein, 11 aa, Homo sapiens
  misc_feature (1)..(11): Table A2; Target 4463; MAGEA4; ENSG00000147381; HLA-A*11:01;
GLLGNNQIFPK

SEQ ID NO: 107306 - protein, 11 aa, Homo sapiens
  misc_feature (1)..(11): Table A2; Target 4464; MAGEA4; ENSG00000147381; HLA-A*31:01;
GLLGNNQIFPK

SEQ ID NO: 107307 - protein, 9 aa, Homo sapiens
  misc_feature (1)..(9): Table A2; Target 4465; MAGEA4; ENSG00000147381; HLA-B*15:01;
GLLGNNQIF

SEQ ID NO: 107308 - protein, 10 aa, Homo sapiens
  misc_feature (1)..(10): Table A2; Target 4466; MAGEA4; ENSG00000147381; HLA-A*02:04;
GLLIIVLGTI

SEQ ID NO: 107309 - protein, 11 aa, Homo sapiens
  misc_feature (1)..(11): Table A2; Target 4467; MAGEA4; ENSG00000147381; HLA-B*56:01;
GPPQSPQGASA

SEQ ID NO: 107310 - protein, 11 aa, Homo sapiens
  misc_feature (1)..(11): Table A2; Target 4468; MAGEA4; ENSG00000147381; HLA-C*07:02;
GPRALAETSYV

SEQ ID NO: 107311 - protein, 10 aa, Homo sapiens
  misc_feature (1)..(10): Table A2; Target 4469; MAGEA4; ENSG00000147381; HLA-A*30:02;
GPRALAETSY

SEQ ID NO: 107312 - protein, 10 aa, Homo sapiens
  misc_feature (1)..(10): Table A2; Target 4470; MAGEA4; ENSG00000147381; HLA-B*07:02;
GPRALAETSY

SEQ ID NO: 107313 - protein, 10 aa, Homo sapiens
  misc_feature (1)..(10): Table A2; Target 4471; MAGEA4; ENSG00000147381; HLA-B*15:01;
GPRALAETSY

SEQ ID NO: 107314 - protein, 10 aa, Homo sapiens
  misc_feature (1)..(10): Table A2; Target 4472; MAGEA4; ENSG00000147381; HLA-B*15:03;
GPRALAETSY

SEQ ID NO: 107315 - protein, 10 aa, Homo sapiens
  misc_feature (1)..(10): Table A2; Target 4473; MAGEA4; ENSG00000147381; HLA-B*35:01;
GPRALAETSY

SEQ ID NO: 107316 - protein, 10 aa, Homo sapiens
  misc_feature (1)..(10): Table A2; Target 4474; MAGEA4; ENSG00000147381; HLA-B*55:01;
GPRALAETSY

SEQ ID NO: 107317 - protein, 11 aa, Homo sapiens
  misc_feature (1)..(11): Table A2; Target 4475; MAGEA4; ENSG00000147381; HLA-B*57:01;
GSNPARYEFLW

SEQ ID NO: 107318 - protein, 9 aa, Homo sapiens
  misc_feature (1)..(9): Table A2; Target 4476; MAGEA4; ENSG00000147381; HLA-A*23:01;
GSNPARYEF

SEQ ID NO: 107319 - protein, 9 aa, Homo sapiens
  misc_feature (1)..(9): Table A2; Target 4477; MAGEA4; ENSG00000147381; HLA-A*29:02;
GSNPARYEF

SEQ ID NO: 107320 - protein, 9 aa, Homo sapiens
  misc_feature (1)..(9): Table A2; Target 4478; MAGEA4; ENSG00000147381; HLA-A*30:02;
GSNPARYEF

SEQ ID NO: 107321 - protein, 9 aa, Homo sapiens
  misc_feature (1)..(9): Table A2; Target 4479; MAGEA4; ENSG00000147381; HLA-A*31:01;
GSNPARYEF

SEQ ID NO: 107322 - protein, 9 aa, Homo sapiens
  misc_feature (1)..(9): Table A2; Target 4480; MAGEA4; ENSG00000147381; HLA-A*32:01;
GSNPARYEF

SEQ ID NO: 107323 - protein, 9 aa, Homo sapiens
  misc_feature (1)..(9): Table A2; Target 4481; MAGEA4; ENSG00000147381; HLA-B*15:01;
GSNPARYEF

SEQ ID NO: 107324 - protein, 9 aa, Homo sapiens
  misc_feature (1)..(9): Table A2; Target 4482; MAGEA4; ENSG00000147381; HLA-B*15:03;
GSNPARYEF

SEQ ID NO: 107325 - protein, 9 aa, Homo sapiens
  misc_feature (1)..(9): Table A2; Target 4483; MAGEA4; ENSG00000147381; HLA-B*46:01;
GSNPARYEF

SEQ ID NO: 107326 - protein, 9 aa, Homo sapiens
  misc_feature (1)..(9): Table A2; Target 4484; MAGEA4; ENSG00000147381; HLA-B*57:01;
GSNPARYEF

SEQ ID NO: 107327 - protein, 9 aa, Homo sapiens
  misc_feature (1)..(9): Table A2; Target 4485; MAGEA4; ENSG00000147381; HLA-B*58:01;
GSNPARYEF

SEQ ID NO: 107328 - protein, 9 aa, Homo sapiens
  misc_feature (1)..(9): Table A2; Target 4486; MAGEA4; ENSG00000147381; HLA-C*02:02;
GSNPARYEF

SEQ ID NO: 107329 - protein, 9 aa, Homo sapiens
  misc_feature (1)..(9): Table A2; Target 4487; MAGEA4; ENSG00000147381; HLA-C*16:01;
GSNPARYEF

SEQ ID NO: 107330 - protein, 9 aa, Homo sapiens
  misc_feature (1)..(9): Table A2; Target 4488; MAGEA4; ENSG00000147381; HLA-C*16:04;
GSNPARYEF

SEQ ID NO: 107331 - protein, 9 aa, Homo sapiens
  misc_feature (1)..(9): Table A2; Target 4489; MAGEA4; ENSG00000147381; HLA-A*02:01;
GTLEEVPAA

SEQ ID NO: 107332 - protein, 9 aa, Homo sapiens
  misc_feature (1)..(9): Table A2; Target 4490; MAGEA4; ENSG00000147381; HLA-A*03:02;
GVMGVYDGR

SEQ ID NO: 107333 - protein, 9 aa, Homo sapiens
  misc_feature (1)..(9): Table A2; Target 4491; MAGEA4; ENSG00000147381; HLA-A*11:01;
GVMGVYDGR

SEQ ID NO: 107334 - protein, 9 aa, Homo sapiens
  misc_feature (1)..(9): Table A2; Target 4492; MAGEA4; ENSG00000147381; HLA-A*31:01;
GVMGVYDGR

SEQ ID NO: 107335 - protein, 9 aa, Homo sapiens
  misc_feature (1)..(9): Table A2; Target 4493; MAGEA4; ENSG00000147381; HLA-A*33:03;
GVMGVYDGR

SEQ ID NO: 107336 - protein, 9 aa, Homo sapiens
  misc_feature (1)..(9): Table A2; Target 4494; MAGEA4; ENSG00000147381; HLA-A*68:01;
GVMGVYDGR

SEQ ID NO: 107337 - protein, 9 aa, Homo sapiens
  misc_feature (1)..(9): Table A2; Target 4495; MAGEA4; ENSG00000147381; HLA-C*07:06;
GVMGVYDGR

SEQ ID NO: 107338 - protein, 11 aa, Homo sapiens
  misc_feature (1)..(11): Table A2; Target 4496; MAGEA4; ENSG00000147381; HLA-A*01:01;
GVYDGREHTVY

SEQ ID NO: 107339 - protein, 11 aa, Homo sapiens
  misc_feature (1)..(11): Table A2; Target 4497; MAGEA4; ENSG00000147381; HLA-A*03:01;
GVYDGREHTVY

SEQ ID NO: 107340 - protein, 11 aa, Homo sapiens
  misc_feature (1)..(11): Table A2; Target 4498; MAGEA4; ENSG00000147381; HLA-A*03:02;
GVYDGREHTVY

SEQ ID NO: 107341 - protein, 11 aa, Homo sapiens
  misc_feature (1)..(11): Table A2; Target 4499; MAGEA4; ENSG00000147381; HLA-A*11:01;
GVYDGREHTVY

SEQ ID NO: 107342 - protein, 11 aa, Homo sapiens
  misc_feature (1)..(11): Table A2; Target 4500; MAGEA4; ENSG00000147381; HLA-A*25:01;
GVYDGREHTVY

SEQ ID NO: 107343 - protein, 11 aa, Homo sapiens
  misc_feature (1)..(11): Table A2; Target 4501; MAGEA4; ENSG00000147381; HLA-A*26:01;
GVYDGREHTVY

SEQ ID NO: 107344 - protein, 11 aa, Homo sapiens
  misc_feature (1)..(11): Table A2; Target 4502; MAGEA4; ENSG00000147381; HLA-A*29:02;
GVYDGREHTVY

SEQ ID NO: 107345 - protein, 11 aa, Homo sapiens
  misc_feature (1)..(11): Table A2; Target 4503; MAGEA4; ENSG00000147381; HLA-A*30:02;
GVYDGREHTVY

SEQ ID NO: 107346 - protein, 11 aa, Homo sapiens
  misc_feature (1)..(11): Table A2; Target 4504; MAGEA4; ENSG00000147381; HLA-A*32:01;
GVYDGREHTVY

SEQ ID NO: 107347 - protein, 11 aa, Homo sapiens
  misc_feature (1)..(11): Table A2; Target 4505; MAGEA4; ENSG00000147381; HLA-B*15:01;
GVYDGREHTVY

SEQ ID NO: 107348 - protein, 11 aa, Homo sapiens
  misc_feature (1)..(11): Table A2; Target 4506; MAGEA4; ENSG00000147381; HLA-B*15:03;
GVYDGREHTVY

SEQ ID NO: 107349 - protein, 11 aa, Homo sapiens
  misc_feature (1)..(11): Table A2; Target 4507; MAGEA4; ENSG00000147381; HLA-B*27:05;
GVYDGREHTVY

SEQ ID NO: 107350 - protein, 11 aa, Homo sapiens
  misc_feature (1)..(11): Table A2; Target 4508; MAGEA4; ENSG00000147381; HLA-B*35:01;
GVYDGREHTVY

SEQ ID NO: 107351 - protein, 11 aa, Homo sapiens
  misc_feature (1)..(11): Table A2; Target 4509; MAGEA4; ENSG00000147381; HLA-B*46:01;
GVYDGREHTVY

SEQ ID NO: 107352 - protein, 11 aa, Homo sapiens
  misc_feature (1)..(11): Table A2; Target 4510; MAGEA4; ENSG00000147381; HLA-B*55:01;
GVYDGREHTVY

SEQ ID NO: 107353 - protein, 11 aa, Homo sapiens
  misc_feature (1)..(11): Table A2; Target 4511; MAGEA4; ENSG00000147381; HLA-B*58:01;
GVYDGREHTVY

SEQ ID NO: 107354 - protein, 11 aa, Homo sapiens
  misc_feature (1)..(11): Table A2; Target 4512; MAGEA4; ENSG00000147381; HLA-C*02:02;
GVYDGREHTVY

SEQ ID NO: 107355 - protein, 11 aa, Homo sapiens
  misc_feature (1)..(11): Table A2; Target 4513; MAGEA4; ENSG00000147381; HLA-C*07:04;
GVYDGREHTVY

SEQ ID NO: 107356 - protein, 11 aa, Homo sapiens
  misc_feature (1)..(11): Table A2; Target 4514; MAGEA4; ENSG00000147381; HLA-C*12:03;
GVYDGREHTVY

SEQ ID NO: 107357 - protein, 11 aa, Homo sapiens
  misc_feature (1)..(11): Table A2; Target 4515; MAGEA4; ENSG00000147381; HLA-C*16:01;
GVYDGREHTVY

SEQ ID NO: 107358 - protein, 11 aa, Homo sapiens
  misc_feature (1)..(11): Table A2; Target 4516; MAGEA4; ENSG00000147381; HLA-C*16:04;
GVYDGREHTVY

SEQ ID NO: 107359 - protein, 10 aa, Homo sapiens
  misc_feature (1)..(10): Table A2; Target 4517; MAGEA4; ENSG00000147381; HLA-A*02:01;
GVYDGREHTV

SEQ ID NO: 107360 - protein, 10 aa, Homo sapiens
  misc_feature (1)..(10): Table A2; Target 4518; MAGEA4; ENSG00000147381; HLA-A*02:03;
GVYDGREHTV

SEQ ID NO: 107361 - protein, 10 aa, Homo sapiens
  misc_feature (1)..(10): Table A2; Target 4519; MAGEA4; ENSG00000147381; HLA-A*02:04;
GVYDGREHTV

SEQ ID NO: 107362 - protein, 10 aa, Homo sapiens
  misc_feature (1)..(10): Table A2; Target 4520; MAGEA4; ENSG00000147381; HLA-A*02:07;
GVYDGREHTV

SEQ ID NO: 107363 - protein, 10 aa, Homo sapiens
  misc_feature (1)..(10): Table A2; Target 4521; MAGEA4; ENSG00000147381; HLA-A*03:01;
GVYDGREHTV

SEQ ID NO: 107364 - protein, 10 aa, Homo sapiens
  misc_feature (1)..(10): Table A2; Target 4522; MAGEA4; ENSG00000147381; HLA-A*25:01;
GVYDGREHTV

SEQ ID NO: 107365 - protein, 10 aa, Homo sapiens
  misc_feature (1)..(10): Table A2; Target 4523; MAGEA4; ENSG00000147381; HLA-A*26:01;
GVYDGREHTV

SEQ ID NO: 107366 - protein, 10 aa, Homo sapiens
  misc_feature (1)..(10): Table A2; Target 4524; MAGEA4; ENSG00000147381; HLA-A*30:01;
GVYDGREHTV

SEQ ID NO: 107367 - protein, 10 aa, Homo sapiens
  misc_feature (1)..(10): Table A2; Target 4525; MAGEA4; ENSG00000147381; HLA-A*32:01;
GVYDGREHTV

SEQ ID NO: 107368 - protein, 10 aa, Homo sapiens
  misc_feature (1)..(10): Table A2; Target 4526; MAGEA4; ENSG00000147381; HLA-A*68:02;
GVYDGREHTV

SEQ ID NO: 107369 - protein, 10 aa, Homo sapiens
  misc_feature (1)..(10): Table A2; Target 4527; MAGEA4; ENSG00000147381; HLA-B*13:02;
GVYDGREHTV

SEQ ID NO: 107370 - protein, 10 aa, Homo sapiens
  misc_feature (1)..(10): Table A2; Target 4528; MAGEA4; ENSG00000147381; HLA-B*15:01;
GVYDGREHTV

SEQ ID NO: 107371 - protein, 10 aa, Homo sapiens
  misc_feature (1)..(10): Table A2; Target 4529; MAGEA4; ENSG00000147381; HLA-B*27:05;
GVYDGREHTV

SEQ ID NO: 107372 - protein, 10 aa, Homo sapiens
  misc_feature (1)..(10): Table A2; Target 4530; MAGEA4; ENSG00000147381; HLA-B*37:01;
GVYDGREHTV

SEQ ID NO: 107373 - protein, 10 aa, Homo sapiens
  misc_feature (1)..(10): Table A2; Target 4531; MAGEA4; ENSG00000147381; HLA-B*40:02;
GVYDGREHTV

SEQ ID NO: 107374 - protein, 10 aa, Homo sapiens
  misc_feature (1)..(10): Table A2; Target 4532; MAGEA4; ENSG00000147381; HLA-B*46:01;
GVYDGREHTV

SEQ ID NO: 107375 - protein, 10 aa, Homo sapiens
  misc_feature (1)..(10): Table A2; Target 4533; MAGEA4; ENSG00000147381; HLA-B*49:01;
GVYDGREHTV

SEQ ID NO: 107376 - protein, 10 aa, Homo sapiens
  misc_feature (1)..(10): Table A2; Target 4534; MAGEA4; ENSG00000147381; HLA-B*51:01;
GVYDGREHTV

SEQ ID NO: 107377 - protein, 10 aa, Homo sapiens
  misc_feature (1)..(10): Table A2; Target 4535; MAGEA4; ENSG00000147381; HLA-B*55:01;
GVYDGREHTV

SEQ ID NO: 107378 - protein, 10 aa, Homo sapiens
  misc_feature (1)..(10): Table A2; Target 4536; MAGEA4; ENSG00000147381; HLA-B*56:01;
GVYDGREHTV

SEQ ID NO: 107379 - protein, 10 aa, Homo sapiens
  misc_feature (1)..(10): Table A2; Target 4537; MAGEA4; ENSG00000147381; HLA-B*58:01;
GVYDGREHTV

SEQ ID NO: 107380 - protein, 10 aa, Homo sapiens
  misc_feature (1)..(10): Table A2; Target 4538; MAGEA4; ENSG00000147381; HLA-C*01:02;
GVYDGREHTV

SEQ ID NO: 107381 - protein, 10 aa, Homo sapiens
  misc_feature (1)..(10): Table A2; Target 4539; MAGEA4; ENSG00000147381; HLA-C*02:02;
GVYDGREHTV

SEQ ID NO: 107382 - protein, 10 aa, Homo sapiens
  misc_feature (1)..(10): Table A2; Target 4540; MAGEA4; ENSG00000147381; HLA-C*03:03;
GVYDGREHTV

SEQ ID NO: 107383 - protein, 10 aa, Homo sapiens
  misc_feature (1)..(10): Table A2; Target 4541; MAGEA4; ENSG00000147381; HLA-C*03:04;
GVYDGREHTV

SEQ ID NO: 107384 - protein, 10 aa, Homo sapiens
  misc_feature (1)..(10): Table A2; Target 4542; MAGEA4; ENSG00000147381; HLA-C*06:02;
GVYDGREHTV

SEQ ID NO: 107385 - protein, 10 aa, Homo sapiens
  misc_feature (1)..(10): Table A2; Target 4543; MAGEA4; ENSG00000147381; HLA-C*07:02;
GVYDGREHTV

SEQ ID NO: 107386 - protein, 10 aa, Homo sapiens
  misc_feature (1)..(10): Table A2; Target 4544; MAGEA4; ENSG00000147381; HLA-C*12:03;
GVYDGREHTV

SEQ ID NO: 107387 - protein, 10 aa, Homo sapiens
  misc_feature (1)..(10): Table A2; Target 4545; MAGEA4; ENSG00000147381; HLA-C*16:02;
GVYDGREHTV

SEQ ID NO: 107388 - protein, 10 aa, Homo sapiens
  misc_feature (1)..(10): Table A2; Target 4546; MAGEA4; ENSG00000147381; HLA-C*16:04;
GVYDGREHTV

SEQ ID NO: 107389 - protein, 8 aa, Homo sapiens
  misc_feature (1)..(8): Table A2; Target 4547; MAGEA4; ENSG00000147381; HLA-A*68:01;
HTVYGEPR

SEQ ID NO: 107390 - protein, 9 aa, Homo sapiens
  misc_feature (1)..(9): Table A2; Target 4548; MAGEA4; ENSG00000147381; HLA-A*68:02;
HVVRVNARV

SEQ ID NO: 107391 - protein, 8 aa, Homo sapiens
  misc_feature (1)..(8): Table A2; Target 4549; MAGEA4; ENSG00000147381; HLA-B*54:01;
IAMEGDSA

SEQ ID NO: 107392 - protein, 8 aa, Homo sapiens
  misc_feature (1)..(8): Table A2; Target 4550; MAGEA4; ENSG00000147381; HLA-C*01:02;
IAMEGDSA

SEQ ID NO: 107393 - protein, 8 aa, Homo sapiens
  misc_feature (1)..(8): Table A2; Target 4551; MAGEA4; ENSG00000147381; HLA-C*03:03;
IAMEGDSA

SEQ ID NO: 107394 - protein, 8 aa, Homo sapiens
  misc_feature (1)..(8): Table A2; Target 4552; MAGEA4; ENSG00000147381; HLA-C*03:04;
IAMEGDSA

SEQ ID NO: 107395 - protein, 8 aa, Homo sapiens
  misc_feature (1)..(8): Table A2; Target 4553; MAGEA4; ENSG00000147381; HLA-C*05:01;
IAMEGDSA

SEQ ID NO: 107396 - protein, 8 aa, Homo sapiens
  misc_feature (1)..(8): Table A2; Target 4554; MAGEA4; ENSG00000147381; HLA-C*14:02;
IAMEGDSA

SEQ ID NO: 107397 - protein, 11 aa, Homo sapiens
  misc_feature (1)..(11): Table A2; Target 4555; MAGEA4; ENSG00000147381; HLA-B*07:02;
IAYPSLREAAL

SEQ ID NO: 107398 - protein, 11 aa, Homo sapiens
  misc_feature (1)..(11): Table A2; Target 4556; MAGEA4; ENSG00000147381; HLA-B*35:03;
IAYPSLREAAL

SEQ ID NO: 107399 - protein, 11 aa, Homo sapiens
  misc_feature (1)..(11): Table A2; Target 4557; MAGEA4; ENSG00000147381; HLA-B*46:01;
IAYPSLREAAL

SEQ ID NO: 107400 - protein, 11 aa, Homo sapiens
  misc_feature (1)..(11): Table A2; Target 4558; MAGEA4; ENSG00000147381; HLA-C*01:02;
IAYPSLREAAL

SEQ ID NO: 107401 - protein, 11 aa, Homo sapiens
  misc_feature (1)..(11): Table A2; Target 4559; MAGEA4; ENSG00000147381; HLA-C*02:02;
IAYPSLREAAL

SEQ ID NO: 107402 - protein, 11 aa, Homo sapiens
  misc_feature (1)..(11): Table A2; Target 4560; MAGEA4; ENSG00000147381; HLA-C*03:03;
IAYPSLREAAL

SEQ ID NO: 107403 - protein, 11 aa, Homo sapiens
  misc_feature (1)..(11): Table A2; Target 4561; MAGEA4; ENSG00000147381; HLA-C*03:04;
IAYPSLREAAL

SEQ ID NO: 107404 - protein, 11 aa, Homo sapiens
  misc_feature (1)..(11): Table A2; Target 4562; MAGEA4; ENSG00000147381; HLA-C*16:01;
IAYPSLREAAL

SEQ ID NO: 107405 - protein, 11 aa, Homo sapiens
  misc_feature (1)..(11): Table A2; Target 4563; MAGEA4; ENSG00000147381; HLA-C*16:02;
IAYPSLREAAL

SEQ ID NO: 107406 - protein, 10 aa, Homo sapiens
  misc_feature (1)..(10): Table A2; Target 4564; MAGEA4; ENSG00000147381; HLA-B*54:01;
IAYPSLREAA

SEQ ID NO: 107407 - protein, 10 aa, Homo sapiens
  misc_feature (1)..(10): Table A2; Target 4565; MAGEA4; ENSG00000147381; HLA-B*56:01;
IAYPSLREAA

SEQ ID NO: 107408 - protein, 9 aa, Homo sapiens
  misc_feature (1)..(9): Table A2; Target 4566; MAGEA4; ENSG00000147381; HLA-A*02:01;
IAYPSLREA

SEQ ID NO: 107409 - protein, 9 aa, Homo sapiens
  misc_feature (1)..(9): Table A2; Target 4567; MAGEA4; ENSG00000147381; HLA-A*02:03;
IAYPSLREA

SEQ ID NO: 107410 - protein, 9 aa, Homo sapiens
  misc_feature (1)..(9): Table A2; Target 4568; MAGEA4; ENSG00000147381; HLA-B*08:01;
IAYPSLREA

SEQ ID NO: 107411 - protein, 9 aa, Homo sapiens
  misc_feature (1)..(9): Table A2; Target 4569; MAGEA4; ENSG00000147381; HLA-B*46:01;
IAYPSLREA

SEQ ID NO: 107412 - protein, 9 aa, Homo sapiens
  misc_feature (1)..(9): Table A2; Target 4570; MAGEA4; ENSG00000147381; HLA-B*51:01;
IAYPSLREA

SEQ ID NO: 107413 - protein, 9 aa, Homo sapiens
  misc_feature (1)..(9): Table A2; Target 4571; MAGEA4; ENSG00000147381; HLA-B*54:01;
IAYPSLREA

SEQ ID NO: 107414 - protein, 9 aa, Homo sapiens
  misc_feature (1)..(9): Table A2; Target 4572; MAGEA4; ENSG00000147381; HLA-B*55:01;
IAYPSLREA

SEQ ID NO: 107415 - protein, 9 aa, Homo sapiens
  misc_feature (1)..(9): Table A2; Target 4573; MAGEA4; ENSG00000147381; HLA-B*56:01;
IAYPSLREA

SEQ ID NO: 107416 - protein, 9 aa, Homo sapiens
  misc_feature (1)..(9): Table A2; Target 4574; MAGEA4; ENSG00000147381; HLA-B*57:01;
IAYPSLREA

SEQ ID NO: 107417 - protein, 9 aa, Homo sapiens
  misc_feature (1)..(9): Table A2; Target 4575; MAGEA4; ENSG00000147381; HLA-B*58:01;
IAYPSLREA

SEQ ID NO: 107418 - protein, 9 aa, Homo sapiens
  misc_feature (1)..(9): Table A2; Target 4576; MAGEA4; ENSG00000147381; HLA-C*02:02;
IAYPSLREA

SEQ ID NO: 107419 - protein, 9 aa, Homo sapiens
  misc_feature (1)..(9): Table A2; Target 4577; MAGEA4; ENSG00000147381; HLA-C*03:03;
IAYPSLREA

SEQ ID NO: 107420 - protein, 9 aa, Homo sapiens
  misc_feature (1)..(9): Table A2; Target 4578; MAGEA4; ENSG00000147381; HLA-C*03:04;
IAYPSLREA

SEQ ID NO: 107421 - protein, 9 aa, Homo sapiens
  misc_feature (1)..(9): Table A2; Target 4579; MAGEA4; ENSG00000147381; HLA-C*06:02;
IAYPSLREA

SEQ ID NO: 107422 - protein, 9 aa, Homo sapiens
  misc_feature (1)..(9): Table A2; Target 4580; MAGEA4; ENSG00000147381; HLA-C*12:03;
IAYPSLREA

SEQ ID NO: 107423 - protein, 9 aa, Homo sapiens
  misc_feature (1)..(9): Table A2; Target 4581; MAGEA4; ENSG00000147381; HLA-C*16:01;
IAYPSLREA

SEQ ID NO: 107424 - protein, 9 aa, Homo sapiens
  misc_feature (1)..(9): Table A2; Target 4582; MAGEA4; ENSG00000147381; HLA-C*16:02;
IAYPSLREA

SEQ ID NO: 107425 - protein, 9 aa, Homo sapiens
  misc_feature (1)..(9): Table A2; Target 4583; MAGEA4; ENSG00000147381; HLA-C*01:02;
IFGKASESL

SEQ ID NO: 107426 - protein, 9 aa, Homo sapiens
  misc_feature (1)..(9): Table A2; Target 4584; MAGEA4; ENSG00000147381; HLA-C*14:02;
IFGKASESL

SEQ ID NO: 107427 - protein, 10 aa, Homo sapiens
  misc_feature (1)..(10): Table A2; Target 4585; MAGEA4; ENSG00000147381; HLA-A*24:02;
IFPKTGLLII

SEQ ID NO: 107428 - protein, 9 aa, Homo sapiens
  misc_feature (1)..(9): Table A2; Target 4586; MAGEA4; ENSG00000147381; HLA-A*23:01;
IFPKTGLLI

SEQ ID NO: 107429 - protein, 9 aa, Homo sapiens
  misc_feature (1)..(9): Table A2; Target 4587; MAGEA4; ENSG00000147381; HLA-A*24:02;
IFPKTGLLI

SEQ ID NO: 107430 - protein, 9 aa, Homo sapiens
  misc_feature (1)..(9): Table A2; Target 4588; MAGEA4; ENSG00000147381; HLA-B*08:01;
IIVLGTIAM

SEQ ID NO: 107431 - protein, 9 aa, Homo sapiens
  misc_feature (1)..(9): Table A2; Target 4589; MAGEA4; ENSG00000147381; HLA-B*15:01;
IIVLGTIAM

SEQ ID NO: 107432 - protein, 9 aa, Homo sapiens
  misc_feature (1)..(9): Table A2; Target 4590; MAGEA4; ENSG00000147381; HLA-B*35:01;
IIVLGTIAM

SEQ ID NO: 107433 - protein, 9 aa, Homo sapiens
  misc_feature (1)..(9): Table A2; Target 4591; MAGEA4; ENSG00000147381; HLA-B*35:03;
IIVLGTIAM

SEQ ID NO: 107434 - protein, 9 aa, Homo sapiens
  misc_feature (1)..(9): Table A2; Target 4592; MAGEA4; ENSG00000147381; HLA-B*39:01;
IIVLGTIAM

SEQ ID NO: 107435 - protein, 9 aa, Homo sapiens
  misc_feature (1)..(9): Table A2; Target 4593; MAGEA4; ENSG00000147381; HLA-B*46:01;
IIVLGTIAM

SEQ ID NO: 107436 - protein, 9 aa, Homo sapiens
  misc_feature (1)..(9): Table A2; Target 4594; MAGEA4; ENSG00000147381; HLA-C*01:02;
IIVLGTIAM

SEQ ID NO: 107437 - protein, 9 aa, Homo sapiens
  misc_feature (1)..(9): Table A2; Target 4595; MAGEA4; ENSG00000147381; HLA-C*03:03;
IIVLGTIAM

SEQ ID NO: 107438 - protein, 9 aa, Homo sapiens
  misc_feature (1)..(9): Table A2; Target 4596; MAGEA4; ENSG00000147381; HLA-C*03:04;
IIVLGTIAM

SEQ ID NO: 107439 - protein, 9 aa, Homo sapiens
  misc_feature (1)..(9): Table A2; Target 4597; MAGEA4; ENSG00000147381; HLA-C*07:04;
IIVLGTIAM

SEQ ID NO: 107440 - protein, 9 aa, Homo sapiens
  misc_feature (1)..(9): Table A2; Target 4598; MAGEA4; ENSG00000147381; HLA-C*14:02;
IIVLGTIAM

SEQ ID NO: 107441 - protein, 10 aa, Homo sapiens
  misc_feature (1)..(10): Table A2; Target 4599; MAGEA4; ENSG00000147381; HLA-C*04:01;
IVLGTIAMEG

SEQ ID NO: 107442 - protein, 8 aa, Homo sapiens
  misc_feature (1)..(8): Table A2; Target 4600; MAGEA4; ENSG00000147381; HLA-A*23:01;
IVLGTIAM

SEQ ID NO: 107443 - protein, 8 aa, Homo sapiens
  misc_feature (1)..(8): Table A2; Target 4601; MAGEA4; ENSG00000147381; HLA-B*46:01;
IVLGTIAM

SEQ ID NO: 107444 - protein, 8 aa, Homo sapiens
  misc_feature (1)..(8): Table A2; Target 4602; MAGEA4; ENSG00000147381; HLA-C*01:02;
IVLGTIAM

SEQ ID NO: 107445 - protein, 8 aa, Homo sapiens
  misc_feature (1)..(8): Table A2; Target 4603; MAGEA4; ENSG00000147381; HLA-C*03:03;
IVLGTIAM

SEQ ID NO: 107446 - protein, 8 aa, Homo sapiens
  misc_feature (1)..(8): Table A2; Target 4604; MAGEA4; ENSG00000147381; HLA-C*14:02;
IVLGTIAM

SEQ ID NO: 107447 - protein, 9 aa, Homo sapiens
  misc_feature (1)..(9): Table A2; Target 4605; MAGEA4; ENSG00000147381; HLA-C*16:02;
KAEMLERVI

SEQ ID NO: 107448 - protein, 10 aa, Homo sapiens
  misc_feature (1)..(10): Table A2; Target 4606; MAGEA4; ENSG00000147381; HLA-B*57:01;
KASESLKMIF

SEQ ID NO: 107449 - protein, 9 aa, Homo sapiens
  misc_feature (1)..(9): Table A2; Target 4607; MAGEA4; ENSG00000147381; HLA-C*16:02;
KASESLKMI

SEQ ID NO: 107450 - protein, 8 aa, Homo sapiens
  misc_feature (1)..(8): Table A2; Target 4608; MAGEA4; ENSG00000147381; HLA-B*37:01;
KASESLKM

SEQ ID NO: 107451 - protein, 8 aa, Homo sapiens
  misc_feature (1)..(8): Table A2; Target 4609; MAGEA4; ENSG00000147381; HLA-B*58:01;
KASESLKM

SEQ ID NO: 107452 - protein, 8 aa, Homo sapiens
  misc_feature (1)..(8): Table A2; Target 4610; MAGEA4; ENSG00000147381; HLA-C*03:04;
KASESLKM

SEQ ID NO: 107453 - protein, 8 aa, Homo sapiens
  misc_feature (1)..(8): Table A2; Target 4611; MAGEA4; ENSG00000147381; HLA-C*16:01;
KASESLKM

SEQ ID NO: 107454 - protein, 8 aa, Homo sapiens
  misc_feature (1)..(8): Table A2; Target 4612; MAGEA4; ENSG00000147381; HLA-C*16:02;
KASESLKM

SEQ ID NO: 107455 - protein, 10 aa, Homo sapiens
  misc_feature (1)..(10): Table A2; Target 4613; MAGEA4; ENSG00000147381; HLA-A*30:01;
KELVTKAEML

SEQ ID NO: 107456 - protein, 10 aa, Homo sapiens
  misc_feature (1)..(10): Table A2; Target 4614; MAGEA4; ENSG00000147381; HLA-B*40:01;
KELVTKAEML

SEQ ID NO: 107457 - protein, 10 aa, Homo sapiens
  misc_feature (1)..(10): Table A2; Target 4615; MAGEA4; ENSG00000147381; HLA-B*40:02;
KELVTKAEML

SEQ ID NO: 107458 - protein, 9 aa, Homo sapiens
  misc_feature (1)..(9): Table A2; Target 4616; MAGEA4; ENSG00000147381; HLA-A*30:01;
KELVTKAEM

SEQ ID NO: 107459 - protein, 9 aa, Homo sapiens
  misc_feature (1)..(9): Table A2; Target 4617; MAGEA4; ENSG00000147381; HLA-B*18:01;
KELVTKAEM

SEQ ID NO: 107460 - protein, 9 aa, Homo sapiens
  misc_feature (1)..(9): Table A2; Target 4618; MAGEA4; ENSG00000147381; HLA-B*37:01;
KELVTKAEM

SEQ ID NO: 107461 - protein, 9 aa, Homo sapiens
  misc_feature (1)..(9): Table A2; Target 4619; MAGEA4; ENSG00000147381; HLA-B*40:01;
KELVTKAEM

SEQ ID NO: 107462 - protein, 9 aa, Homo sapiens
  misc_feature (1)..(9): Table A2; Target 4620; MAGEA4; ENSG00000147381; HLA-B*40:02;
KELVTKAEM

SEQ ID NO: 107463 - protein, 9 aa, Homo sapiens
  misc_feature (1)..(9): Table A2; Target 4621; MAGEA4; ENSG00000147381; HLA-B*44:02;
KELVTKAEM

SEQ ID NO: 107464 - protein, 9 aa, Homo sapiens
  misc_feature (1)..(9): Table A2; Target 4622; MAGEA4; ENSG00000147381; HLA-B*44:03;
KELVTKAEM

SEQ ID NO: 107465 - protein, 9 aa, Homo sapiens
  misc_feature (1)..(9): Table A2; Target 4623; MAGEA4; ENSG00000147381; HLA-B*49:01;
KELVTKAEM

SEQ ID NO: 107466 - protein, 11 aa, Homo sapiens
  misc_feature (1)..(11): Table A2; Target 4624; MAGEA4; ENSG00000147381; HLA-B*40:01;
KEVDPASNTYT

SEQ ID NO: 107467 - protein, 11 aa, Homo sapiens
  misc_feature (1)..(11): Table A2; Target 4625; MAGEA4; ENSG00000147381; HLA-B*49:01;
KEVDPASNTYT

SEQ ID NO: 107468 - protein, 10 aa, Homo sapiens
  misc_feature (1)..(10): Table A2; Target 4626; MAGEA4; ENSG00000147381; HLA-A*25:01;
KEVDPASNTY

SEQ ID NO: 107469 - protein, 10 aa, Homo sapiens
  misc_feature (1)..(10): Table A2; Target 4627; MAGEA4; ENSG00000147381; HLA-A*26:01;
KEVDPASNTY

SEQ ID NO: 107470 - protein, 10 aa, Homo sapiens
  misc_feature (1)..(10): Table A2; Target 4628; MAGEA4; ENSG00000147381; HLA-A*29:02;
KEVDPASNTY

SEQ ID NO: 107471 - protein, 10 aa, Homo sapiens
  misc_feature (1)..(10): Table A2; Target 4629; MAGEA4; ENSG00000147381; HLA-A*30:01;
KEVDPASNTY

SEQ ID NO: 107472 - protein, 10 aa, Homo sapiens
  misc_feature (1)..(10): Table A2; Target 4630; MAGEA4; ENSG00000147381; HLA-A*30:02;
KEVDPASNTY

SEQ ID NO: 107473 - protein, 10 aa, Homo sapiens
  misc_feature (1)..(10): Table A2; Target 4631; MAGEA4; ENSG00000147381; HLA-A*32:01;
KEVDPASNTY

SEQ ID NO: 107474 - protein, 10 aa, Homo sapiens
  misc_feature (1)..(10): Table A2; Target 4632; MAGEA4; ENSG00000147381; HLA-B*15:01;
KEVDPASNTY

SEQ ID NO: 107475 - protein, 10 aa, Homo sapiens
  misc_feature (1)..(10): Table A2; Target 4633; MAGEA4; ENSG00000147381; HLA-B*15:03;
KEVDPASNTY

SEQ ID NO: 107476 - protein, 10 aa, Homo sapiens
  misc_feature (1)..(10): Table A2; Target 4634; MAGEA4; ENSG00000147381; HLA-B*18:01;
KEVDPASNTY

SEQ ID NO: 107477 - protein, 10 aa, Homo sapiens
  misc_feature (1)..(10): Table A2; Target 4635; MAGEA4; ENSG00000147381; HLA-B*27:02;
KEVDPASNTY

SEQ ID NO: 107478 - protein, 10 aa, Homo sapiens
  misc_feature (1)..(10): Table A2; Target 4636; MAGEA4; ENSG00000147381; HLA-B*27:05;
KEVDPASNTY

SEQ ID NO: 107479 - protein, 10 aa, Homo sapiens
  misc_feature (1)..(10): Table A2; Target 4637; MAGEA4; ENSG00000147381; HLA-B*37:01;
KEVDPASNTY

SEQ ID NO: 107480 - protein, 10 aa, Homo sapiens
  misc_feature (1)..(10): Table A2; Target 4638; MAGEA4; ENSG00000147381; HLA-B*39:01;
KEVDPASNTY

SEQ ID NO: 107481 - protein, 10 aa, Homo sapiens
  misc_feature (1)..(10): Table A2; Target 4639; MAGEA4; ENSG00000147381; HLA-B*40:01;
KEVDPASNTY

SEQ ID NO: 107482 - protein, 10 aa, Homo sapiens
  misc_feature (1)..(10): Table A2; Target 4640; MAGEA4; ENSG00000147381; HLA-B*40:02;
KEVDPASNTY

SEQ ID NO: 107483 - protein, 10 aa, Homo sapiens
  misc_feature (1)..(10): Table A2; Target 4641; MAGEA4; ENSG00000147381; HLA-B*44:02;
KEVDPASNTY

SEQ ID NO: 107484 - protein, 10 aa, Homo sapiens
  misc_feature (1)..(10): Table A2; Target 4642; MAGEA4; ENSG00000147381; HLA-B*44:03;
KEVDPASNTY

SEQ ID NO: 107485 - protein, 10 aa, Homo sapiens
  misc_feature (1)..(10): Table A2; Target 4643; MAGEA4; ENSG00000147381; HLA-B*46:01;
KEVDPASNTY

SEQ ID NO: 107486 - protein, 10 aa, Homo sapiens
  misc_feature (1)..(10): Table A2; Target 4644; MAGEA4; ENSG00000147381; HLA-B*49:01;
KEVDPASNTY

SEQ ID NO: 107487 - protein, 10 aa, Homo sapiens
  misc_feature (1)..(10): Table A2; Target 4645; MAGEA4; ENSG00000147381; HLA-B*57:01;
KEVDPASNTY

SEQ ID NO: 107488 - protein, 10 aa, Homo sapiens
  misc_feature (1)..(10): Table A2; Target 4646; MAGEA4; ENSG00000147381; HLA-B*58:01;
KEVDPASNTY

SEQ ID NO: 107489 - protein, 10 aa, Homo sapiens
  misc_feature (1)..(10): Table A2; Target 4647; MAGEA4; ENSG00000147381; HLA-C*02:02;
KEVDPASNTY

SEQ ID NO: 107490 - protein, 10 aa, Homo sapiens
  misc_feature (1)..(10): Table A2; Target 4648; MAGEA4; ENSG00000147381; HLA-C*12:03;
KEVDPASNTY

SEQ ID NO: 107491 - protein, 10 aa, Homo sapiens
  misc_feature (1)..(10): Table A2; Target 4649; MAGEA4; ENSG00000147381; HLA-C*14:02;
KEVDPASNTY

SEQ ID NO: 107492 - protein, 10 aa, Homo sapiens
  misc_feature (1)..(10): Table A2; Target 4650; MAGEA4; ENSG00000147381; HLA-C*16:01;
KEVDPASNTY

SEQ ID NO: 107493 - protein, 10 aa, Homo sapiens
  misc_feature (1)..(10): Table A2; Target 4651; MAGEA4; ENSG00000147381; HLA-C*16:02;
KEVDPASNTY

SEQ ID NO: 107494 - protein, 10 aa, Homo sapiens
  misc_feature (1)..(10): Table A2; Target 4652; MAGEA4; ENSG00000147381; HLA-C*16:04;
KEVDPASNTY

SEQ ID NO: 107495 - protein, 9 aa, Homo sapiens
  misc_feature (1)..(9): Table A2; Target 4653; MAGEA4; ENSG00000147381; HLA-B*40:01;
KEVDPASNT

SEQ ID NO: 107496 - protein, 9 aa, Homo sapiens
  misc_feature (1)..(9): Table A2; Target 4654; MAGEA4; ENSG00000147381; HLA-B*49:01;
KEVDPASNT

SEQ ID NO: 107497 - protein, 11 aa, Homo sapiens
  misc_feature (1)..(11): Table A2; Target 4655; MAGEA4; ENSG00000147381; HLA-A*02:01;
KMIFGIDVKEV

SEQ ID NO: 107498 - protein, 11 aa, Homo sapiens
  misc_feature (1)..(11): Table A2; Target 4656; MAGEA4; ENSG00000147381; HLA-A*02:07;
KVDELAHFLLR

SEQ ID NO: 107499 - protein, 11 aa, Homo sapiens
  misc_feature (1)..(11): Table A2; Target 4657; MAGEA4; ENSG00000147381; HLA-A*03:01;
KVDELAHFLLR

SEQ ID NO: 107500 - protein, 11 aa, Homo sapiens
  misc_feature (1)..(11): Table A2; Target 4658; MAGEA4; ENSG00000147381; HLA-A*31:01;
KVDELAHFLLR

SEQ ID NO: 107501 - protein, 10 aa, Homo sapiens
  misc_feature (1)..(10): Table A2; Target 4659; MAGEA4; ENSG00000147381; HLA-A*02:01;
KVDELAHFLL

SEQ ID NO: 107502 - protein, 10 aa, Homo sapiens
  misc_feature (1)..(10): Table A2; Target 4660; MAGEA4; ENSG00000147381; HLA-A*02:04;
KVDELAHFLL

SEQ ID NO: 107503 - protein, 10 aa, Homo sapiens
  misc_feature (1)..(10): Table A2; Target 4661; MAGEA4; ENSG00000147381; HLA-A*02:07;
KVDELAHFLL

SEQ ID NO: 107504 - protein, 10 aa, Homo sapiens
  misc_feature (1)..(10): Table A2; Target 4662; MAGEA4; ENSG00000147381; HLA-A*31:01;
KVDELAHFLL

SEQ ID NO: 107505 - protein, 9 aa, Homo sapiens
  misc_feature (1)..(9): Table A2; Target 4663; MAGEA4; ENSG00000147381; HLA-A*02:01;
KVDELAHFL

SEQ ID NO: 107506 - protein, 9 aa, Homo sapiens
  misc_feature (1)..(9): Table A2; Target 4664; MAGEA4; ENSG00000147381; HLA-A*02:04;
KVDELAHFL

SEQ ID NO: 107507 - protein, 9 aa, Homo sapiens
  misc_feature (1)..(9): Table A2; Target 4665; MAGEA4; ENSG00000147381; HLA-A*02:07;
KVDELAHFL

SEQ ID NO: 107508 - protein, 9 aa, Homo sapiens
  misc_feature (1)..(9): Table A2; Target 4666; MAGEA4; ENSG00000147381; HLA-A*03:02;
KVDELAHFL

SEQ ID NO: 107509 - protein, 9 aa, Homo sapiens
  misc_feature (1)..(9): Table A2; Target 4667; MAGEA4; ENSG00000147381; HLA-A*31:01;
KVDELAHFL

SEQ ID NO: 107510 - protein, 9 aa, Homo sapiens
  misc_feature (1)..(9): Table A2; Target 4668; MAGEA4; ENSG00000147381; HLA-A*68:02;
KVDELAHFL

SEQ ID NO: 107511 - protein, 9 aa, Homo sapiens
  misc_feature (1)..(9): Table A2; Target 4669; MAGEA4; ENSG00000147381; HLA-B*13:02;
KVDELAHFL

SEQ ID NO: 107512 - protein, 9 aa, Homo sapiens
  misc_feature (1)..(9): Table A2; Target 4670; MAGEA4; ENSG00000147381; HLA-B*38:01;
KVDELAHFL

SEQ ID NO: 107513 - protein, 9 aa, Homo sapiens
  misc_feature (1)..(9): Table A2; Target 4671; MAGEA4; ENSG00000147381; HLA-B*58:01;
KVDELAHFL

SEQ ID NO: 107514 - protein, 9 aa, Homo sapiens
  misc_feature (1)..(9): Table A2; Target 4672; MAGEA4; ENSG00000147381; HLA-C*05:01;
KVDELAHFL

SEQ ID NO: 107515 - protein, 8 aa, Homo sapiens
  misc_feature (1)..(8): Table A2; Target 4673; MAGEA4; ENSG00000147381; HLA-C*05:01;
KVDELAHF

SEQ ID NO: 107516 - protein, 11 aa, Homo sapiens
  misc_feature (1)..(11): Table A2; Target 4674; MAGEA4; ENSG00000147381; HLA-A*31:01;
KVLEHVVRVNA

SEQ ID NO: 107517 - protein, 9 aa, Homo sapiens
  misc_feature (1)..(9): Table A2; Target 4675; MAGEA4; ENSG00000147381; HLA-A*02:01;
KVLEHVVRV

SEQ ID NO: 107518 - protein, 9 aa, Homo sapiens
  misc_feature (1)..(9): Table A2; Target 4676; MAGEA4; ENSG00000147381; HLA-A*02:03;
KVLEHVVRV

SEQ ID NO: 107519 - protein, 9 aa, Homo sapiens
  misc_feature (1)..(9): Table A2; Target 4677; MAGEA4; ENSG00000147381; HLA-A*02:04;
KVLEHVVRV

SEQ ID NO: 107520 - protein, 9 aa, Homo sapiens
  misc_feature (1)..(9): Table A2; Target 4678; MAGEA4; ENSG00000147381; HLA-A*02:07;
KVLEHVVRV

SEQ ID NO: 107521 - protein, 9 aa, Homo sapiens
  misc_feature (1)..(9): Table A2; Target 4679; MAGEA4; ENSG00000147381; HLA-A*03:01;
KVLEHVVRV

SEQ ID NO: 107522 - protein, 9 aa, Homo sapiens
  misc_feature (1)..(9): Table A2; Target 4680; MAGEA4; ENSG00000147381; HLA-A*03:02;
KVLEHVVRV

SEQ ID NO: 107523 - protein, 9 aa, Homo sapiens
  misc_feature (1)..(9): Table A2; Target 4681; MAGEA4; ENSG00000147381; HLA-A*31:01;
KVLEHVVRV

SEQ ID NO: 107524 - protein, 9 aa, Homo sapiens
  misc_feature (1)..(9): Table A2; Target 4682; MAGEA4; ENSG00000147381; HLA-A*68:02;
KVLEHVVRV

SEQ ID NO: 107525 - protein, 9 aa, Homo sapiens
  misc_feature (1)..(9): Table A2; Target 4683; MAGEA4; ENSG00000147381; HLA-B*13:02;
KVLEHVVRV

SEQ ID NO: 107526 - protein, 9 aa, Homo sapiens
  misc_feature (1)..(9): Table A2; Target 4684; MAGEA4; ENSG00000147381; HLA-B*37:01;
KVLEHVVRV

SEQ ID NO: 107527 - protein, 9 aa, Homo sapiens
  misc_feature (1)..(9): Table A2; Target 4685; MAGEA4; ENSG00000147381; HLA-B*55:01;
KVLEHVVRV

SEQ ID NO: 107528 - protein, 9 aa, Homo sapiens
  misc_feature (1)..(9): Table A2; Target 4686; MAGEA4; ENSG00000147381; HLA-C*02:02;
KVLEHVVRV

SEQ ID NO: 107529 - protein, 8 aa, Homo sapiens
  misc_feature (1)..(8): Table A2; Target 4687; MAGEA4; ENSG00000147381; HLA-A*31:01;
KVLEHVVR

SEQ ID NO: 107530 - protein, 9 aa, Homo sapiens
  misc_feature (1)..(9): Table A2; Target 4688; MAGEA4; ENSG00000147381; HLA-C*05:01;
LAETSYVKV

SEQ ID NO: 107531 - protein, 8 aa, Homo sapiens
  misc_feature (1)..(8): Table A2; Target 4689; MAGEA4; ENSG00000147381; HLA-B*27:02;
LAETSYVK

SEQ ID NO: 107532 - protein, 9 aa, Homo sapiens
  misc_feature (1)..(9): Table A2; Target 4690; MAGEA4; ENSG00000147381; HLA-A*29:02;
LAHFLLRKY

SEQ ID NO: 107533 - protein, 9 aa, Homo sapiens
  misc_feature (1)..(9): Table A2; Target 4691; MAGEA4; ENSG00000147381; HLA-B*40:02;
LEHVVRVNA

SEQ ID NO: 107534 - protein, 8 aa, Homo sapiens
  misc_feature (1)..(8): Table A2; Target 4692; MAGEA4; ENSG00000147381; HLA-B*18:01;
LERVIKNY

SEQ ID NO: 107535 - protein, 9 aa, Homo sapiens
  misc_feature (1)..(9): Table A2; Target 4693; MAGEA4; ENSG00000147381; HLA-A*03:02;
LGNNQIFPK

SEQ ID NO: 107536 - protein, 9 aa, Homo sapiens
  misc_feature (1)..(9): Table A2; Target 4694; MAGEA4; ENSG00000147381; HLA-A*11:01;
LGNNQIFPK

SEQ ID NO: 107537 - protein, 9 aa, Homo sapiens
  misc_feature (1)..(9): Table A2; Target 4695; MAGEA4; ENSG00000147381; HLA-B*27:02;
LGNNQIFPK

SEQ ID NO: 107538 - protein, 9 aa, Homo sapiens
  misc_feature (1)..(9): Table A2; Target 4696; MAGEA4; ENSG00000147381; HLA-C*07:06;
LGNNQIFPK

SEQ ID NO: 107539 - protein, 10 aa, Homo sapiens
  misc_feature (1)..(10): Table A2; Target 4697; MAGEA4; ENSG00000147381; HLA-B*27:02;
LGVMGVYDGR

SEQ ID NO: 107540 - protein, 10 aa, Homo sapiens
  misc_feature (1)..(10): Table A2; Target 4698; MAGEA4; ENSG00000147381; HLA-B*46:01;
LIIVLGTIAM

SEQ ID NO: 107541 - protein, 10 aa, Homo sapiens
  misc_feature (1)..(10): Table A2; Target 4699; MAGEA4; ENSG00000147381; HLA-A*03:01;
LLGNNQIFPK

SEQ ID NO: 107542 - protein, 10 aa, Homo sapiens
  misc_feature (1)..(10): Table A2; Target 4700; MAGEA4; ENSG00000147381; HLA-A*03:02;
LLGNNQIFPK

SEQ ID NO: 107543 - protein, 10 aa, Homo sapiens
  misc_feature (1)..(10): Table A2; Target 4701; MAGEA4; ENSG00000147381; HLA-B*27:02;
LLGNNQIFPK

SEQ ID NO: 107544 - protein, 9 aa, Homo sapiens
  misc_feature (1)..(9): Table A2; Target 4702; MAGEA4; ENSG00000147381; HLA-A*02:03;
LLIIVLGTI

SEQ ID NO: 107545 - protein, 10 aa, Homo sapiens
  misc_feature (1)..(10): Table A2; Target 4703; MAGEA4; ENSG00000147381; HLA-B*35:01;
LPTTISFTCW

SEQ ID NO: 107546 - protein, 10 aa, Homo sapiens
  misc_feature (1)..(10): Table A2; Target 4704; MAGEA4; ENSG00000147381; HLA-B*51:01;
LPTTISFTCW

SEQ ID NO: 107547 - protein, 10 aa, Homo sapiens
  misc_feature (1)..(10): Table A2; Target 4705; MAGEA4; ENSG00000147381; HLA-B*54:01;
LPTTISFTCW

SEQ ID NO: 107548 - protein, 9 aa, Homo sapiens
  misc_feature (1)..(9): Table A2; Target 4706; MAGEA4; ENSG00000147381; HLA-B*35:03;
LPTTISFTC

SEQ ID NO: 107549 - protein, 9 aa, Homo sapiens
  misc_feature (1)..(9): Table A2; Target 4707; MAGEA4; ENSG00000147381; HLA-B*54:01;
LPTTISFTC

SEQ ID NO: 107550 - protein, 9 aa, Homo sapiens
  misc_feature (1)..(9): Table A2; Target 4708; MAGEA4; ENSG00000147381; HLA-B*56:01;
LPTTISFTC

SEQ ID NO: 107551 - protein, 11 aa, Homo sapiens
  misc_feature (1)..(11): Table A2; Target 4709; MAGEA4; ENSG00000147381; HLA-B*57:01;
LSNKVDELAHF

SEQ ID NO: 107552 - protein, 10 aa, Homo sapiens
  misc_feature (1)..(10): Table A2; Target 4710; MAGEA4; ENSG00000147381; HLA-C*06:02;
LSYDGLLGNN

SEQ ID NO: 107553 - protein, 10 aa, Homo sapiens
  misc_feature (1)..(10): Table A2; Target 4711; MAGEA4; ENSG00000147381; HLA-C*12:03;
LSYDGLLGNN

SEQ ID NO: 107554 - protein, 11 aa, Homo sapiens
  misc_feature (1)..(11): Table A2; Target 4712; MAGEA4; ENSG00000147381; HLA-C*04:01;
LTQDWVQENYL

SEQ ID NO: 107555 - protein, 10 aa, Homo sapiens
  misc_feature (1)..(10): Table A2; Target 4713; MAGEA4; ENSG00000147381; HLA-A*01:01;
LTQDWVQENY

SEQ ID NO: 107556 - protein, 10 aa, Homo sapiens
  misc_feature (1)..(10): Table A2; Target 4714; MAGEA4; ENSG00000147381; HLA-A*29:02;
LTQDWVQENY

SEQ ID NO: 107557 - protein, 10 aa, Homo sapiens
  misc_feature (1)..(10): Table A2; Target 4715; MAGEA4; ENSG00000147381; HLA-A*30:02;
LTQDWVQENY

SEQ ID NO: 107558 - protein, 10 aa, Homo sapiens
  misc_feature (1)..(10): Table A2; Target 4716; MAGEA4; ENSG00000147381; HLA-A*32:01;
LTQDWVQENY

SEQ ID NO: 107559 - protein, 10 aa, Homo sapiens
  misc_feature (1)..(10): Table A2; Target 4717; MAGEA4; ENSG00000147381; HLA-B*57:01;
LTQDWVQENY

SEQ ID NO: 107560 - protein, 10 aa, Homo sapiens
  misc_feature (1)..(10): Table A2; Target 4718; MAGEA4; ENSG00000147381; HLA-B*58:01;
LTQDWVQENY

SEQ ID NO: 107561 - protein, 10 aa, Homo sapiens
  misc_feature (1)..(10): Table A2; Target 4719; MAGEA4; ENSG00000147381; HLA-C*07:01;
LTQDWVQENY

SEQ ID NO: 107562 - protein, 9 aa, Homo sapiens
  misc_feature (1)..(9): Table A2; Target 4720; MAGEA4; ENSG00000147381; HLA-A*02:01;
LVPGTLEEV

SEQ ID NO: 107563 - protein, 9 aa, Homo sapiens
  misc_feature (1)..(9): Table A2; Target 4721; MAGEA4; ENSG00000147381; HLA-A*02:07;
LVPGTLEEV

SEQ ID NO: 107564 - protein, 9 aa, Homo sapiens
  misc_feature (1)..(9): Table A2; Target 4722; MAGEA4; ENSG00000147381; HLA-A*01:01;
LVTCLGLSY

SEQ ID NO: 107565 - protein, 9 aa, Homo sapiens
  misc_feature (1)..(9): Table A2; Target 4723; MAGEA4; ENSG00000147381; HLA-A*26:01;
LVTCLGLSY

SEQ ID NO: 107566 - protein, 9 aa, Homo sapiens
  misc_feature (1)..(9): Table A2; Target 4724; MAGEA4; ENSG00000147381; HLA-A*29:02;
LVTCLGLSY

SEQ ID NO: 107567 - protein, 9 aa, Homo sapiens
  misc_feature (1)..(9): Table A2; Target 4725; MAGEA4; ENSG00000147381; HLA-A*30:02;
LVTCLGLSY

SEQ ID NO: 107568 - protein, 10 aa, Homo sapiens
  misc_feature (1)..(10): Table A2; Target 4726; MAGEA4; ENSG00000147381; HLA-A*02:01;
MIFGIDVKEV

SEQ ID NO: 107569 - protein, 10 aa, Homo sapiens
  misc_feature (1)..(10): Table A2; Target 4727; MAGEA4; ENSG00000147381; HLA-A*02:03;
MIFGIDVKEV

SEQ ID NO: 107570 - protein, 10 aa, Homo sapiens
  misc_feature (1)..(10): Table A2; Target 4728; MAGEA4; ENSG00000147381; HLA-A*02:04;
MIFGIDVKEV

SEQ ID NO: 107571 - protein, 10 aa, Homo sapiens
  misc_feature (1)..(10): Table A2; Target 4729; MAGEA4; ENSG00000147381; HLA-A*02:07;
MIFGIDVKEV

SEQ ID NO: 107572 - protein, 10 aa, Homo sapiens
  misc_feature (1)..(10): Table A2; Target 4730; MAGEA4; ENSG00000147381; HLA-A*68:02;
MIFGIDVKEV

SEQ ID NO: 107573 - protein, 9 aa, Homo sapiens
  misc_feature (1)..(9): Table A2; Target 4731; MAGEA4; ENSG00000147381; HLA-A*01:01;
MLERVIKNY

SEQ ID NO: 107574 - protein, 9 aa, Homo sapiens
  misc_feature (1)..(9): Table A2; Target 4732; MAGEA4; ENSG00000147381; HLA-A*29:02;
MLERVIKNY

SEQ ID NO: 107575 - protein, 9 aa, Homo sapiens
  misc_feature (1)..(9): Table A2; Target 4733; MAGEA4; ENSG00000147381; HLA-A*30:02;
MLERVIKNY

SEQ ID NO: 107576 - protein, 9 aa, Homo sapiens
  misc_feature (1)..(9): Table A2; Target 4734; MAGEA4; ENSG00000147381; HLA-B*44:02;
MLERVIKNY

SEQ ID NO: 107577 - protein, 8 aa, Homo sapiens
  misc_feature (1)..(8): Table A2; Target 4735; MAGEA4; ENSG00000147381; HLA-C*16:01;
NARVRIAY

SEQ ID NO: 107578 - protein, 9 aa, Homo sapiens
  misc_feature (1)..(9): Table A2; Target 4736; MAGEA4; ENSG00000147381; HLA-A*23:01;
NKVDELAHF

SEQ ID NO: 107579 - protein, 9 aa, Homo sapiens
  misc_feature (1)..(9): Table A2; Target 4737; MAGEA4; ENSG00000147381; HLA-B*15:03;
NKVDELAHF

SEQ ID NO: 107580 - protein, 9 aa, Homo sapiens
  misc_feature (1)..(9): Table A2; Target 4738; MAGEA4; ENSG00000147381; HLA-B*13:02;
NQIFPKTGL

SEQ ID NO: 107581 - protein, 9 aa, Homo sapiens
  misc_feature (1)..(9): Table A2; Target 4739; MAGEA4; ENSG00000147381; HLA-B*15:01;
NQIFPKTGL

SEQ ID NO: 107582 - protein, 9 aa, Homo sapiens
  misc_feature (1)..(9): Table A2; Target 4740; MAGEA4; ENSG00000147381; HLA-B*15:03;
NQIFPKTGL

SEQ ID NO: 107583 - protein, 9 aa, Homo sapiens
  misc_feature (1)..(9): Table A2; Target 4741; MAGEA4; ENSG00000147381; HLA-B*27:05;
NQIFPKTGL

SEQ ID NO: 107584 - protein, 9 aa, Homo sapiens
  misc_feature (1)..(9): Table A2; Target 4742; MAGEA4; ENSG00000147381; HLA-B*38:01;
NQIFPKTGL

SEQ ID NO: 107585 - protein, 9 aa, Homo sapiens
  misc_feature (1)..(9): Table A2; Target 4743; MAGEA4; ENSG00000147381; HLA-B*39:01;
NQIFPKTGL

SEQ ID NO: 107586 - protein, 9 aa, Homo sapiens
  misc_feature (1)..(9): Table A2; Target 4744; MAGEA4; ENSG00000147381; HLA-A*23:01;
NTYTLVTCL

SEQ ID NO: 107587 - protein, 9 aa, Homo sapiens
  misc_feature (1)..(9): Table A2; Target 4745; MAGEA4; ENSG00000147381; HLA-A*25:01;
NTYTLVTCL

SEQ ID NO: 107588 - protein, 9 aa, Homo sapiens
  misc_feature (1)..(9): Table A2; Target 4746; MAGEA4; ENSG00000147381; HLA-A*26:01;
NTYTLVTCL

SEQ ID NO: 107589 - protein, 9 aa, Homo sapiens
  misc_feature (1)..(9): Table A2; Target 4747; MAGEA4; ENSG00000147381; HLA-A*68:01;
NTYTLVTCL

SEQ ID NO: 107590 - protein, 9 aa, Homo sapiens
  misc_feature (1)..(9): Table A2; Target 4748; MAGEA4; ENSG00000147381; HLA-A*68:02;
NTYTLVTCL

SEQ ID NO: 107591 - protein, 9 aa, Homo sapiens
  misc_feature (1)..(9): Table A2; Target 4749; MAGEA4; ENSG00000147381; HLA-B*18:01;
NTYTLVTCL

SEQ ID NO: 107592 - protein, 9 aa, Homo sapiens
  misc_feature (1)..(9): Table A2; Target 4750; MAGEA4; ENSG00000147381; HLA-B*39:01;
NTYTLVTCL

SEQ ID NO: 107593 - protein, 9 aa, Homo sapiens
  misc_feature (1)..(9): Table A2; Target 4751; MAGEA4; ENSG00000147381; HLA-C*06:02;
NTYTLVTCL

SEQ ID NO: 107594 - protein, 9 aa, Homo sapiens
  misc_feature (1)..(9): Table A2; Target 4752; MAGEA4; ENSG00000147381; HLA-C*07:06;
NTYTLVTCL

SEQ ID NO: 107595 - protein, 9 aa, Homo sapiens
  misc_feature (1)..(9): Table A2; Target 4753; MAGEA4; ENSG00000147381; HLA-C*12:03;
NTYTLVTCL

SEQ ID NO: 107596 - protein, 9 aa, Homo sapiens
  misc_feature (1)..(9): Table A2; Target 4754; MAGEA4; ENSG00000147381; HLA-A*24:02;
NYKRCFPVI

SEQ ID NO: 107597 - protein, 8 aa, Homo sapiens
  misc_feature (1)..(8): Table A2; Target 4755; MAGEA4; ENSG00000147381; HLA-B*07:02;
PASNTYTL

SEQ ID NO: 107598 - protein, 8 aa, Homo sapiens
  misc_feature (1)..(8): Table A2; Target 4756; MAGEA4; ENSG00000147381; HLA-C*07:02;
PASNTYTL

SEQ ID NO: 107599 - protein, 8 aa, Homo sapiens
  misc_feature (1)..(8): Table A2; Target 4757; MAGEA4; ENSG00000147381; HLA-B*27:02;
PDAESLFR

SEQ ID NO: 107600 - protein, 10 aa, Homo sapiens
  misc_feature (1)..(10): Table A2; Target 4758; MAGEA4; ENSG00000147381; HLA-A*02:01;
PLVPGTLEEV

SEQ ID NO: 107601 - protein, 10 aa, Homo sapiens
  misc_feature (1)..(10): Table A2; Target 4759; MAGEA4; ENSG00000147381; HLA-A*02:03;
PLVPGTLEEV

SEQ ID NO: 107602 - protein, 9 aa, Homo sapiens
  misc_feature (1)..(9): Table A2; Target 4760; MAGEA4; ENSG00000147381; HLA-B*15:03;
PRALAETSY

SEQ ID NO: 107603 - protein, 9 aa, Homo sapiens
  misc_feature (1)..(9): Table A2; Target 4761; MAGEA4; ENSG00000147381; HLA-B*27:02;
PRALAETSY

SEQ ID NO: 107604 - protein, 9 aa, Homo sapiens
  misc_feature (1)..(9): Table A2; Target 4762; MAGEA4; ENSG00000147381; HLA-C*07:01;
PRALAETSY

SEQ ID NO: 107605 - protein, 9 aa, Homo sapiens
  misc_feature (1)..(9): Table A2; Target 4763; MAGEA4; ENSG00000147381; HLA-C*07:04;
PRALAETSY

SEQ ID NO: 107606 - protein, 9 aa, Homo sapiens
  misc_feature (1)..(9): Table A2; Target 4764; MAGEA4; ENSG00000147381; HLA-B*57:01;
PTTISFTCW

SEQ ID NO: 107607 - protein, 9 aa, Homo sapiens
  misc_feature (1)..(9): Table A2; Target 4765; MAGEA4; ENSG00000147381; HLA-A*30:01;
QDWVQENYL

SEQ ID NO: 107608 - protein, 9 aa, Homo sapiens
  misc_feature (1)..(9): Table A2; Target 4766; MAGEA4; ENSG00000147381; HLA-B*37:01;
QDWVQENYL

SEQ ID NO: 107609 - protein, 8 aa, Homo sapiens
  misc_feature (1)..(8): Table A2; Target 4767; MAGEA4; ENSG00000147381; HLA-B*18:01;
QDWVQENY

SEQ ID NO: 107610 - protein, 11 aa, Homo sapiens
  misc_feature (1)..(11): Table A2; Target 4768; MAGEA4; ENSG00000147381; HLA-A*30:01;
QEAAVSSSSPL

SEQ ID NO: 107611 - protein, 11 aa, Homo sapiens
  misc_feature (1)..(11): Table A2; Target 4769; MAGEA4; ENSG00000147381; HLA-B*40:01;
QEAAVSSSSPL

SEQ ID NO: 107612 - protein, 10 aa, Homo sapiens
  misc_feature (1)..(10): Table A2; Target 4770; MAGEA4; ENSG00000147381; HLA-A*30:01;
QEEALGLVGA

SEQ ID NO: 107613 - protein, 10 aa, Homo sapiens
  misc_feature (1)..(10): Table A2; Target 4771; MAGEA4; ENSG00000147381; HLA-B*40:02;
QEEALGLVGA

SEQ ID NO: 107614 - protein, 10 aa, Homo sapiens
  misc_feature (1)..(10): Table A2; Target 4772; MAGEA4; ENSG00000147381; HLA-B*49:01;
QEEALGLVGA

SEQ ID NO: 107615 - protein, 8 aa, Homo sapiens
  misc_feature (1)..(8): Table A2; Target 4773; MAGEA4; ENSG00000147381; HLA-B*49:01;
QEEALGLV

SEQ ID NO: 107616 - protein, 11 aa, Homo sapiens
  misc_feature (1)..(11): Table A2; Target 4774; MAGEA4; ENSG00000147381; HLA-A*02:01;
QIFPKTGLLII

SEQ ID NO: 107617 - protein, 11 aa, Homo sapiens
  misc_feature (1)..(11): Table A2; Target 4775; MAGEA4; ENSG00000147381; HLA-A*02:03;
QIFPKTGLLII

SEQ ID NO: 107618 - protein, 11 aa, Homo sapiens
  misc_feature (1)..(11): Table A2; Target 4776; MAGEA4; ENSG00000147381; HLA-A*02:04;
QIFPKTGLLII

SEQ ID NO: 107619 - protein, 9 aa, Homo sapiens
  misc_feature (1)..(9): Table A2; Target 4777; MAGEA4; ENSG00000147381; HLA-A*02:03;
QIFPKTGLL

SEQ ID NO: 107620 - protein, 9 aa, Homo sapiens
  misc_feature (1)..(9): Table A2; Target 4778; MAGEA4; ENSG00000147381; HLA-A*03:01;
QIFPKTGLL

SEQ ID NO: 107621 - protein, 8 aa, Homo sapiens
  misc_feature (1)..(8): Table A2; Target 4779; MAGEA4; ENSG00000147381; HLA-B*08:01;
QIFPKTGL

SEQ ID NO: 107622 - protein, 9 aa, Homo sapiens
  misc_feature (1)..(9): Table A2; Target 4780; MAGEA4; ENSG00000147381; HLA-C*01:02;
QSPQGASAL

SEQ ID NO: 107623 - protein, 10 aa, Homo sapiens
  misc_feature (1)..(10): Table A2; Target 4781; MAGEA4; ENSG00000147381; HLA-A*01:01;
QVPGSNPARY

SEQ ID NO: 107624 - protein, 10 aa, Homo sapiens
  misc_feature (1)..(10): Table A2; Target 4782; MAGEA4; ENSG00000147381; HLA-A*25:01;
QVPGSNPARY

SEQ ID NO: 107625 - protein, 10 aa, Homo sapiens
  misc_feature (1)..(10): Table A2; Target 4783; MAGEA4; ENSG00000147381; HLA-A*26:01;
QVPGSNPARY

SEQ ID NO: 107626 - protein, 10 aa, Homo sapiens
  misc_feature (1)..(10): Table A2; Target 4784; MAGEA4; ENSG00000147381; HLA-A*29:02;
QVPGSNPARY

SEQ ID NO: 107627 - protein, 10 aa, Homo sapiens
  misc_feature (1)..(10): Table A2; Target 4785; MAGEA4; ENSG00000147381; HLA-A*30:02;
QVPGSNPARY

SEQ ID NO: 107628 - protein, 10 aa, Homo sapiens
  misc_feature (1)..(10): Table A2; Target 4786; MAGEA4; ENSG00000147381; HLA-A*32:01;
QVPGSNPARY

SEQ ID NO: 107629 - protein, 10 aa, Homo sapiens
  misc_feature (1)..(10): Table A2; Target 4787; MAGEA4; ENSG00000147381; HLA-A*68:01;
QVPGSNPARY

SEQ ID NO: 107630 - protein, 10 aa, Homo sapiens
  misc_feature (1)..(10): Table A2; Target 4788; MAGEA4; ENSG00000147381; HLA-C*07:04;
QVPGSNPARY

SEQ ID NO: 107631 - protein, 9 aa, Homo sapiens
  misc_feature (1)..(9): Table A2; Target 4789; MAGEA4; ENSG00000147381; HLA-A*68:01;
QVPGSNPAR

SEQ ID NO: 107632 - protein, 9 aa, Homo sapiens
  misc_feature (1)..(9): Table A2; Target 4790; MAGEA4; ENSG00000147381; HLA-B*54:01;
RAKELVTKA

SEQ ID NO: 107633 - protein, 9 aa, Homo sapiens
  misc_feature (1)..(9): Table A2; Target 4791; MAGEA4; ENSG00000147381; HLA-B*55:01;
RAKELVTKA

SEQ ID NO: 107634 - protein, 10 aa, Homo sapiens
  misc_feature (1)..(10): Table A2; Target 4792; MAGEA4; ENSG00000147381; HLA-A*03:02;
RALAETSYVK

SEQ ID NO: 107635 - protein, 10 aa, Homo sapiens
  misc_feature (1)..(10): Table A2; Target 4793; MAGEA4; ENSG00000147381; HLA-B*27:02;
RALAETSYVK

SEQ ID NO: 107636 - protein, 9 aa, Homo sapiens
  misc_feature (1)..(9): Table A2; Target 4794; MAGEA4; ENSG00000147381; HLA-A*03:01;
RCFPVIFGK

SEQ ID NO: 107637 - protein, 9 aa, Homo sapiens
  misc_feature (1)..(9): Table A2; Target 4795; MAGEA4; ENSG00000147381; HLA-A*03:02;
RCFPVIFGK

SEQ ID NO: 107638 - protein, 9 aa, Homo sapiens
  misc_feature (1)..(9): Table A2; Target 4796; MAGEA4; ENSG00000147381; HLA-A*11:01;
RCFPVIFGK

SEQ ID NO: 107639 - protein, 9 aa, Homo sapiens
  misc_feature (1)..(9): Table A2; Target 4797; MAGEA4; ENSG00000147381; HLA-A*31:01;
RCFPVIFGK

SEQ ID NO: 107640 - protein, 9 aa, Homo sapiens
  misc_feature (1)..(9): Table A2; Target 4798; MAGEA4; ENSG00000147381; HLA-B*57:01;
RCFPVIFGK

SEQ ID NO: 107641 - protein, 11 aa, Homo sapiens
  misc_feature (1)..(11): Table A2; Target 4799; MAGEA4; ENSG00000147381; HLA-A*30:01;
REALSNKVDEL

SEQ ID NO: 107642 - protein, 11 aa, Homo sapiens
  misc_feature (1)..(11): Table A2; Target 4800; MAGEA4; ENSG00000147381; HLA-B*40:01;
REALSNKVDEL

SEQ ID NO: 107643 - protein, 8 aa, Homo sapiens
  misc_feature (1)..(8): Table A2; Target 4801; MAGEA4; ENSG00000147381; HLA-B*37:01;
REALSNKV

SEQ ID NO: 107644 - protein, 8 aa, Homo sapiens
  misc_feature (1)..(8): Table A2; Target 4802; MAGEA4; ENSG00000147381; HLA-B*49:01;
REALSNKV

SEQ ID NO: 107645 - protein, 10 aa, Homo sapiens
  misc_feature (1)..(10): Table A2; Target 4803; MAGEA4; ENSG00000147381; HLA-A*02:03;
RIAYPSLREA

SEQ ID NO: 107646 - protein, 11 aa, Homo sapiens
  misc_feature (1)..(11): Table A2; Target 4804; MAGEA4; ENSG00000147381; HLA-A*29:02;
RQVPGSNPARY

SEQ ID NO: 107647 - protein, 11 aa, Homo sapiens
  misc_feature (1)..(11): Table A2; Target 4805; MAGEA4; ENSG00000147381; HLA-A*30:02;
RQVPGSNPARY

SEQ ID NO: 107648 - protein, 11 aa, Homo sapiens
  misc_feature (1)..(11): Table A2; Target 4806; MAGEA4; ENSG00000147381; HLA-A*32:01;
RQVPGSNPARY

SEQ ID NO: 107649 - protein, 11 aa, Homo sapiens
  misc_feature (1)..(11): Table A2; Target 4807; MAGEA4; ENSG00000147381; HLA-B*15:01;
RQVPGSNPARY

SEQ ID NO: 107650 - protein, 11 aa, Homo sapiens
  misc_feature (1)..(11): Table A2; Target 4808; MAGEA4; ENSG00000147381; HLA-B*15:03;
RQVPGSNPARY

SEQ ID NO: 107651 - protein, 11 aa, Homo sapiens
  misc_feature (1)..(11): Table A2; Target 4809; MAGEA4; ENSG00000147381; HLA-B*44:03;
RQVPGSNPARY

SEQ ID NO: 107652 - protein, 11 aa, Homo sapiens
  misc_feature (1)..(11): Table A2; Target 4810; MAGEA4; ENSG00000147381; HLA-B*57:01;
RQVPGSNPARY

SEQ ID NO: 107653 - protein, 11 aa, Homo sapiens
  misc_feature (1)..(11): Table A2; Target 4811; MAGEA4; ENSG00000147381; HLA-B*58:01;
RQVPGSNPARY

SEQ ID NO: 107654 - protein, 11 aa, Homo sapiens
  misc_feature (1)..(11): Table A2; Target 4812; MAGEA4; ENSG00000147381; HLA-C*02:02;
RQVPGSNPARY

SEQ ID NO: 107655 - protein, 11 aa, Homo sapiens
  misc_feature (1)..(11): Table A2; Target 4813; MAGEA4; ENSG00000147381; HLA-C*07:04;
RQVPGSNPARY

SEQ ID NO: 107656 - protein, 11 aa, Homo sapiens
  misc_feature (1)..(11): Table A2; Target 4814; MAGEA4; ENSG00000147381; HLA-C*16:02;
RQVPGSNPARY

SEQ ID NO: 107657 - protein, 11 aa, Homo sapiens
  misc_feature (1)..(11): Table A2; Target 4815; MAGEA4; ENSG00000147381; HLA-C*16:04;
RQVPGSNPARY

SEQ ID NO: 107658 - protein, 10 aa, Homo sapiens
  misc_feature (1)..(10): Table A2; Target 4816; MAGEA4; ENSG00000147381; HLA-A*31:01;
RQVPGSNPAR

SEQ ID NO: 107659 - protein, 8 aa, Homo sapiens
  misc_feature (1)..(8): Table A2; Target 4817; MAGEA4; ENSG00000147381; HLA-A*31:01;
RVIKNYKR

SEQ ID NO: 107660 - protein, 10 aa, Homo sapiens
  misc_feature (1)..(10): Table A2; Target 4818; MAGEA4; ENSG00000147381; HLA-A*32:01;
RVNARVRIAY

SEQ ID NO: 107661 - protein, 10 aa, Homo sapiens
  misc_feature (1)..(10): Table A2; Target 4819; MAGEA4; ENSG00000147381; HLA-A*03:01;
RVRIAYPSLR

SEQ ID NO: 107662 - protein, 10 aa, Homo sapiens
  misc_feature (1)..(10): Table A2; Target 4820; MAGEA4; ENSG00000147381; HLA-A*31:01;
RVRIAYPSLR

SEQ ID NO: 107663 - protein, 9 aa, Homo sapiens
  misc_feature (1)..(9): Table A2; Target 4821; MAGEA4; ENSG00000147381; HLA-B*07:02;
RVRIAYPSL

SEQ ID NO: 107664 - protein, 11 aa, Homo sapiens
  misc_feature (1)..(11): Table A2; Target 4822; MAGEA4; ENSG00000147381; HLA-C*12:03;
SAGPPQSPQGA

SEQ ID NO: 107665 - protein, 9 aa, Homo sapiens
  misc_feature (1)..(9): Table A2; Target 4823; MAGEA4; ENSG00000147381; HLA-C*03:03;
SAGPPQSPQ

SEQ ID NO: 107666 - protein, 9 aa, Homo sapiens
  misc_feature (1)..(9): Table A2; Target 4824; MAGEA4; ENSG00000147381; HLA-A*02:01;
SALPTTISF

SEQ ID NO: 107667 - protein, 9 aa, Homo sapiens
  misc_feature (1)..(9): Table A2; Target 4825; MAGEA4; ENSG00000147381; HLA-A*02:04;
SALPTTISF

SEQ ID NO: 107668 - protein, 9 aa, Homo sapiens
  misc_feature (1)..(9): Table A2; Target 4826; MAGEA4; ENSG00000147381; HLA-A*02:07;
SALPTTISF

SEQ ID NO: 107669 - protein, 9 aa, Homo sapiens
  misc_feature (1)..(9): Table A2; Target 4827; MAGEA4; ENSG00000147381; HLA-A*11:01;
SALPTTISF

SEQ ID NO: 107670 - protein, 9 aa, Homo sapiens
  misc_feature (1)..(9): Table A2; Target 4828; MAGEA4; ENSG00000147381; HLA-A*23:01;
SALPTTISF

SEQ ID NO: 107671 - protein, 9 aa, Homo sapiens
  misc_feature (1)..(9): Table A2; Target 4829; MAGEA4; ENSG00000147381; HLA-A*24:02;
SALPTTISF

SEQ ID NO: 107672 - protein, 9 aa, Homo sapiens
  misc_feature (1)..(9): Table A2; Target 4830; MAGEA4; ENSG00000147381; HLA-A*25:01;
SALPTTISF

SEQ ID NO: 107673 - protein, 9 aa, Homo sapiens
  misc_feature (1)..(9): Table A2; Target 4831; MAGEA4; ENSG00000147381; HLA-A*26:01;
SALPTTISF

SEQ ID NO: 107674 - protein, 9 aa, Homo sapiens
  misc_feature (1)..(9): Table A2; Target 4832; MAGEA4; ENSG00000147381; HLA-A*29:02;
SALPTTISF

SEQ ID NO: 107675 - protein, 9 aa, Homo sapiens
  misc_feature (1)..(9): Table A2; Target 4833; MAGEA4; ENSG00000147381; HLA-A*30:01;
SALPTTISF

SEQ ID NO: 107676 - protein, 9 aa, Homo sapiens
  misc_feature (1)..(9): Table A2; Target 4834; MAGEA4; ENSG00000147381; HLA-A*30:02;
SALPTTISF

SEQ ID NO: 107677 - protein, 9 aa, Homo sapiens
  misc_feature (1)..(9): Table A2; Target 4835; MAGEA4; ENSG00000147381; HLA-A*31:01;
SALPTTISF

SEQ ID NO: 107678 - protein, 9 aa, Homo sapiens
  misc_feature (1)..(9): Table A2; Target 4836; MAGEA4; ENSG00000147381; HLA-A*32:01;
SALPTTISF

SEQ ID NO: 107679 - protein, 9 aa, Homo sapiens
  misc_feature (1)..(9): Table A2; Target 4837; MAGEA4; ENSG00000147381; HLA-A*33:01;
SALPTTISF

SEQ ID NO: 107680 - protein, 9 aa, Homo sapiens
  misc_feature (1)..(9): Table A2; Target 4838; MAGEA4; ENSG00000147381; HLA-A*33:03;
SALPTTISF

SEQ ID NO: 107681 - protein, 9 aa, Homo sapiens
  misc_feature (1)..(9): Table A2; Target 4839; MAGEA4; ENSG00000147381; HLA-A*68:01;
SALPTTISF

SEQ ID NO: 107682 - protein, 9 aa, Homo sapiens
  misc_feature (1)..(9): Table A2; Target 4840; MAGEA4; ENSG00000147381; HLA-B*07:02;
SALPTTISF

SEQ ID NO: 107683 - protein, 9 aa, Homo sapiens
  misc_feature (1)..(9): Table A2; Target 4841; MAGEA4; ENSG00000147381; HLA-B*08:01;
SALPTTISF

SEQ ID NO: 107684 - protein, 9 aa, Homo sapiens
  misc_feature (1)..(9): Table A2; Target 4842; MAGEA4; ENSG00000147381; HLA-B*15:01;
SALPTTISF

SEQ ID NO: 107685 - protein, 9 aa, Homo sapiens
  misc_feature (1)..(9): Table A2; Target 4843; MAGEA4; ENSG00000147381; HLA-B*15:03;
SALPTTISF

SEQ ID NO: 107686 - protein, 9 aa, Homo sapiens
  misc_feature (1)..(9): Table A2; Target 4844; MAGEA4; ENSG00000147381; HLA-B*18:01;
SALPTTISF

SEQ ID NO: 107687 - protein, 9 aa, Homo sapiens
  misc_feature (1)..(9): Table A2; Target 4845; MAGEA4; ENSG00000147381; HLA-B*27:02;
SALPTTISF

SEQ ID NO: 107688 - protein, 9 aa, Homo sapiens
  misc_feature (1)..(9): Table A2; Target 4846; MAGEA4; ENSG00000147381; HLA-B*35:01;
SALPTTISF

SEQ ID NO: 107689 - protein, 9 aa, Homo sapiens
  misc_feature (1)..(9): Table A2; Target 4847; MAGEA4; ENSG00000147381; HLA-B*35:03;
SALPTTISF

SEQ ID NO: 107690 - protein, 9 aa, Homo sapiens
  misc_feature (1)..(9): Table A2; Target 4848; MAGEA4; ENSG00000147381; HLA-B*37:01;
SALPTTISF

SEQ ID NO: 107691 - protein, 9 aa, Homo sapiens
  misc_feature (1)..(9): Table A2; Target 4849; MAGEA4; ENSG00000147381; HLA-B*38:01;
SALPTTISF

SEQ ID NO: 107692 - protein, 9 aa, Homo sapiens
  misc_feature (1)..(9): Table A2; Target 4850; MAGEA4; ENSG00000147381; HLA-B*39:01;
SALPTTISF

SEQ ID NO: 107693 - protein, 9 aa, Homo sapiens
  misc_feature (1)..(9): Table A2; Target 4851; MAGEA4; ENSG00000147381; HLA-B*44:02;
SALPTTISF

SEQ ID NO: 107694 - protein, 9 aa, Homo sapiens
  misc_feature (1)..(9): Table A2; Target 4852; MAGEA4; ENSG00000147381; HLA-B*44:03;
SALPTTISF

SEQ ID NO: 107695 - protein, 9 aa, Homo sapiens
  misc_feature (1)..(9): Table A2; Target 4853; MAGEA4; ENSG00000147381; HLA-B*46:01;
SALPTTISF

SEQ ID NO: 107696 - protein, 9 aa, Homo sapiens
  misc_feature (1)..(9): Table A2; Target 4854; MAGEA4; ENSG00000147381; HLA-B*51:01;
SALPTTISF

SEQ ID NO: 107697 - protein, 9 aa, Homo sapiens
  misc_feature (1)..(9): Table A2; Target 4855; MAGEA4; ENSG00000147381; HLA-B*54:01;
SALPTTISF

SEQ ID NO: 107698 - protein, 9 aa, Homo sapiens
  misc_feature (1)..(9): Table A2; Target 4856; MAGEA4; ENSG00000147381; HLA-B*55:01;
SALPTTISF

SEQ ID NO: 107699 - protein, 9 aa, Homo sapiens
  misc_feature (1)..(9): Table A2; Target 4857; MAGEA4; ENSG00000147381; HLA-B*56:01;
SALPTTISF

SEQ ID NO: 107700 - protein, 9 aa, Homo sapiens
  misc_feature (1)..(9): Table A2; Target 4858; MAGEA4; ENSG00000147381; HLA-B*57:01;
SALPTTISF

SEQ ID NO: 107701 - protein, 9 aa, Homo sapiens
  misc_feature (1)..(9): Table A2; Target 4859; MAGEA4; ENSG00000147381; HLA-B*58:01;
SALPTTISF

SEQ ID NO: 107702 - protein, 9 aa, Homo sapiens
  misc_feature (1)..(9): Table A2; Target 4860; MAGEA4; ENSG00000147381; HLA-C*01:02;
SALPTTISF

SEQ ID NO: 107703 - protein, 9 aa, Homo sapiens
  misc_feature (1)..(9): Table A2; Target 4861; MAGEA4; ENSG00000147381; HLA-C*02:02;
SALPTTISF

SEQ ID NO: 107704 - protein, 9 aa, Homo sapiens
  misc_feature (1)..(9): Table A2; Target 4862; MAGEA4; ENSG00000147381; HLA-C*03:03;
SALPTTISF

SEQ ID NO: 107705 - protein, 9 aa, Homo sapiens
  misc_feature (1)..(9): Table A2; Target 4863; MAGEA4; ENSG00000147381; HLA-C*03:04;
SALPTTISF

SEQ ID NO: 107706 - protein, 9 aa, Homo sapiens
  misc_feature (1)..(9): Table A2; Target 4864; MAGEA4; ENSG00000147381; HLA-C*04:01;
SALPTTISF

SEQ ID NO: 107707 - protein, 9 aa, Homo sapiens
  misc_feature (1)..(9): Table A2; Target 4865; MAGEA4; ENSG00000147381; HLA-C*05:01;
SALPTTISF

SEQ ID NO: 107708 - protein, 9 aa, Homo sapiens
  misc_feature (1)..(9): Table A2; Target 4866; MAGEA4; ENSG00000147381; HLA-C*07:02;
SALPTTISF

SEQ ID NO: 107709 - protein, 9 aa, Homo sapiens
  misc_feature (1)..(9): Table A2; Target 4867; MAGEA4; ENSG00000147381; HLA-C*07:04;
SALPTTISF

SEQ ID NO: 107710 - protein, 9 aa, Homo sapiens
  misc_feature (1)..(9): Table A2; Target 4868; MAGEA4; ENSG00000147381; HLA-C*07:06;
SALPTTISF

SEQ ID NO: 107711 - protein, 9 aa, Homo sapiens
  misc_feature (1)..(9): Table A2; Target 4869; MAGEA4; ENSG00000147381; HLA-C*12:03;
SALPTTISF

SEQ ID NO: 107712 - protein, 9 aa, Homo sapiens
  misc_feature (1)..(9): Table A2; Target 4870; MAGEA4; ENSG00000147381; HLA-C*14:02;
SALPTTISF

SEQ ID NO: 107713 - protein, 9 aa, Homo sapiens
  misc_feature (1)..(9): Table A2; Target 4871; MAGEA4; ENSG00000147381; HLA-C*16:01;
SALPTTISF

SEQ ID NO: 107714 - protein, 9 aa, Homo sapiens
  misc_feature (1)..(9): Table A2; Target 4872; MAGEA4; ENSG00000147381; HLA-C*16:02;
SALPTTISF

SEQ ID NO: 107715 - protein, 9 aa, Homo sapiens
  misc_feature (1)..(9): Table A2; Target 4873; MAGEA4; ENSG00000147381; HLA-C*16:04;
SALPTTISF

SEQ ID NO: 107716 - protein, 9 aa, Homo sapiens
  misc_feature (1)..(9): Table A2; Target 4874; MAGEA4; ENSG00000147381; HLA-A*30:01;
SEEEIWEEL

SEQ ID NO: 107717 - protein, 9 aa, Homo sapiens
  misc_feature (1)..(9): Table A2; Target 4875; MAGEA4; ENSG00000147381; HLA-B*40:01;
SEEEIWEEL

SEQ ID NO: 107718 - protein, 8 aa, Homo sapiens
  misc_feature (1)..(8): Table A2; Target 4876; MAGEA4; ENSG00000147381; HLA-B*18:01;
SESLKMIF

SEQ ID NO: 107719 - protein, 8 aa, Homo sapiens
  misc_feature (1)..(8): Table A2; Target 4877; MAGEA4; ENSG00000147381; HLA-B*37:01;
SESLKMIF

SEQ ID NO: 107720 - protein, 8 aa, Homo sapiens
  misc_feature (1)..(8): Table A2; Target 4878; MAGEA4; ENSG00000147381; HLA-B*44:02;
SESLKMIF

SEQ ID NO: 107721 - protein, 8 aa, Homo sapiens
  misc_feature (1)..(8): Table A2; Target 4879; MAGEA4; ENSG00000147381; HLA-B*44:03;
SESLKMIF

SEQ ID NO: 107722 - protein, 10 aa, Homo sapiens
  misc_feature (1)..(10): Table A2; Target 4880; MAGEA4; ENSG00000147381; HLA-A*03:01;
SLFREALSNK

SEQ ID NO: 107723 - protein, 10 aa, Homo sapiens
  misc_feature (1)..(10): Table A2; Target 4881; MAGEA4; ENSG00000147381; HLA-A*03:02;
SLFREALSNK

SEQ ID NO: 107724 - protein, 11 aa, Homo sapiens
  misc_feature (1)..(11): Table A2; Target 4882; MAGEA4; ENSG00000147381; HLA-B*54:01;
SPDAESLFREA

SEQ ID NO: 107725 - protein, 11 aa, Homo sapiens
  misc_feature (1)..(11): Table A2; Target 4883; MAGEA4; ENSG00000147381; HLA-B*55:01;
SPDAESLFREA

SEQ ID NO: 107726 - protein, 11 aa, Homo sapiens
  misc_feature (1)..(11): Table A2; Target 4884; MAGEA4; ENSG00000147381; HLA-B*56:01;
SPDAESLFREA

SEQ ID NO: 107727 - protein, 8 aa, Homo sapiens
  misc_feature (1)..(8): Table A2; Target 4885; MAGEA4; ENSG00000147381; HLA-B*55:01;
SPDAESLF

SEQ ID NO: 107728 - protein, 8 aa, Homo sapiens
  misc_feature (1)..(8): Table A2; Target 4886; MAGEA4; ENSG00000147381; HLA-C*05:01;
SPDAESLF

SEQ ID NO: 107729 - protein, 11 aa, Homo sapiens
  misc_feature (1)..(11): Table A2; Target 4887; MAGEA4; ENSG00000147381; HLA-B*56:01;
SPLVPGTLEEV

SEQ ID NO: 107730 - protein, 8 aa, Homo sapiens
  misc_feature (1)..(8): Table A2; Target 4888; MAGEA4; ENSG00000147381; HLA-B*07:02;
SPLVPGTL

SEQ ID NO: 107731 - protein, 8 aa, Homo sapiens
  misc_feature (1)..(8): Table A2; Target 4889; MAGEA4; ENSG00000147381; HLA-B*08:01;
SPLVPGTL

SEQ ID NO: 107732 - protein, 8 aa, Homo sapiens
  misc_feature (1)..(8): Table A2; Target 4890; MAGEA4; ENSG00000147381; HLA-C*07:02;
SPLVPGTL

SEQ ID NO: 107733 - protein, 8 aa, Homo sapiens
  misc_feature (1)..(8): Table A2; Target 4891; MAGEA4; ENSG00000147381; HLA-B*07:02;
SPQGASAL

SEQ ID NO: 107734 - protein, 8 aa, Homo sapiens
  misc_feature (1)..(8): Table A2; Target 4892; MAGEA4; ENSG00000147381; HLA-C*07:02;
SPQGASAL

SEQ ID NO: 107735 - protein, 9 aa, Homo sapiens
  misc_feature (1)..(9): Table A2; Target 4893; MAGEA4; ENSG00000147381; HLA-B*07:02;
SSPLVPGTL

SEQ ID NO: 107736 - protein, 9 aa, Homo sapiens
  misc_feature (1)..(9): Table A2; Target 4894; MAGEA4; ENSG00000147381; HLA-B*46:01;
SSPLVPGTL

SEQ ID NO: 107737 - protein, 9 aa, Homo sapiens
  misc_feature (1)..(9): Table A2; Target 4895; MAGEA4; ENSG00000147381; HLA-B*58:01;
SSPLVPGTL

SEQ ID NO: 107738 - protein, 9 aa, Homo sapiens
  misc_feature (1)..(9): Table A2; Target 4896; MAGEA4; ENSG00000147381; HLA-C*01:02;
SSPLVPGTL

SEQ ID NO: 107739 - protein, 9 aa, Homo sapiens
  misc_feature (1)..(9): Table A2; Target 4897; MAGEA4; ENSG00000147381; HLA-C*03:04;
SSPLVPGTL

SEQ ID NO: 107740 - protein, 9 aa, Homo sapiens
  misc_feature (1)..(9): Table A2; Target 4898; MAGEA4; ENSG00000147381; HLA-C*07:02;
SSPLVPGTL

SEQ ID NO: 107741 - protein, 11 aa, Homo sapiens
  misc_feature (1)..(11): Table A2; Target 4899; MAGEA4; ENSG00000147381; HLA-A*11:01;
STSPDAESLFR

SEQ ID NO: 107742 - protein, 11 aa, Homo sapiens
  misc_feature (1)..(11): Table A2; Target 4900; MAGEA4; ENSG00000147381; HLA-A*68:01;
STSPDAESLFR

SEQ ID NO: 107743 - protein, 11 aa, Homo sapiens
  misc_feature (1)..(11): Table A2; Target 4901; MAGEA4; ENSG00000147381; HLA-C*07:06;
STSPDAESLFR

SEQ ID NO: 107744 - protein, 11 aa, Homo sapiens
  misc_feature (1)..(11): Table A2; Target 4902; MAGEA4; ENSG00000147381; HLA-A*23:01;
SYDGLLGNNQI

SEQ ID NO: 107745 - protein, 11 aa, Homo sapiens
  misc_feature (1)..(11): Table A2; Target 4903; MAGEA4; ENSG00000147381; HLA-A*24:02;
SYDGLLGNNQI

SEQ ID NO: 107746 - protein, 11 aa, Homo sapiens
  misc_feature (1)..(11): Table A2; Target 4904; MAGEA4; ENSG00000147381; HLA-B*35:03;
SYDGLLGNNQI

SEQ ID NO: 107747 - protein, 11 aa, Homo sapiens
  misc_feature (1)..(11): Table A2; Target 4905; MAGEA4; ENSG00000147381; HLA-B*38:01;
SYDGLLGNNQI

SEQ ID NO: 107748 - protein, 11 aa, Homo sapiens
  misc_feature (1)..(11): Table A2; Target 4906; MAGEA4; ENSG00000147381; HLA-C*04:01;
SYDGLLGNNQI

SEQ ID NO: 107749 - protein, 9 aa, Homo sapiens
  misc_feature (1)..(9): Table A2; Target 4907; MAGEA4; ENSG00000147381; HLA-C*04:01;
SYDGLLGNN

SEQ ID NO: 107750 - protein, 9 aa, Homo sapiens
  misc_feature (1)..(9): Table A2; Target 4908; MAGEA4; ENSG00000147381; HLA-A*23:01;
SYVKVLEHV

SEQ ID NO: 107751 - protein, 9 aa, Homo sapiens
  misc_feature (1)..(9): Table A2; Target 4909; MAGEA4; ENSG00000147381; HLA-A*24:02;
SYVKVLEHV

SEQ ID NO: 107752 - protein, 10 aa, Homo sapiens
  misc_feature (1)..(10): Table A2; Target 4910; MAGEA4; ENSG00000147381; HLA-A*29:02;
TLVTCLGLSY

SEQ ID NO: 107753 - protein, 10 aa, Homo sapiens
  misc_feature (1)..(10): Table A2; Target 4911; MAGEA4; ENSG00000147381; HLA-B*38:01;
TQDWVQENYL

SEQ ID NO: 107754 - protein, 10 aa, Homo sapiens
  misc_feature (1)..(10): Table A2; Target 4912; MAGEA4; ENSG00000147381; HLA-C*05:01;
TQDWVQENYL

SEQ ID NO: 107755 - protein, 9 aa, Homo sapiens
  misc_feature (1)..(9): Table A2; Target 4913; MAGEA4; ENSG00000147381; HLA-A*01:01;
TQDWVQENY

SEQ ID NO: 107756 - protein, 9 aa, Homo sapiens
  misc_feature (1)..(9): Table A2; Target 4914; MAGEA4; ENSG00000147381; HLA-A*30:02;
TQDWVQENY

SEQ ID NO: 107757 - protein, 9 aa, Homo sapiens
  misc_feature (1)..(9): Table A2; Target 4915; MAGEA4; ENSG00000147381; HLA-B*15:01;
TQDWVQENY

SEQ ID NO: 107758 - protein, 9 aa, Homo sapiens
  misc_feature (1)..(9): Table A2; Target 4916; MAGEA4; ENSG00000147381; HLA-B*15:03;
TQDWVQENY

SEQ ID NO: 107759 - protein, 9 aa, Homo sapiens
  misc_feature (1)..(9): Table A2; Target 4917; MAGEA4; ENSG00000147381; HLA-B*38:01;
TQDWVQENY

SEQ ID NO: 107760 - protein, 9 aa, Homo sapiens
  misc_feature (1)..(9): Table A2; Target 4918; MAGEA4; ENSG00000147381; HLA-B*39:01;
TQDWVQENY

SEQ ID NO: 107761 - protein, 9 aa, Homo sapiens
  misc_feature (1)..(9): Table A2; Target 4919; MAGEA4; ENSG00000147381; HLA-C*05:01;
TQDWVQENY

SEQ ID NO: 107762 - protein, 10 aa, Homo sapiens
  misc_feature (1)..(10): Table A2; Target 4920; MAGEA4; ENSG00000147381; HLA-A*68:01;
TSPDAESLFR

SEQ ID NO: 107763 - protein, 10 aa, Homo sapiens
  misc_feature (1)..(10): Table A2; Target 4921; MAGEA4; ENSG00000147381; HLA-B*27:02;
TSPDAESLFR

SEQ ID NO: 107764 - protein, 9 aa, Homo sapiens
  misc_feature (1)..(9): Table A2; Target 4922; MAGEA4; ENSG00000147381; HLA-C*01:02;
TSPDAESLF

SEQ ID NO: 107765 - protein, 9 aa, Homo sapiens
  misc_feature (1)..(9): Table A2; Target 4923; MAGEA4; ENSG00000147381; HLA-C*05:01;
TSPDAESLF

SEQ ID NO: 107766 - protein, 8 aa, Homo sapiens
  misc_feature (1)..(8): Table A2; Target 4924; MAGEA4; ENSG00000147381; HLA-C*01:02;
TSPDAESL

SEQ ID NO: 107767 - protein, 10 aa, Homo sapiens
  misc_feature (1)..(10): Table A2; Target 4925; MAGEA4; ENSG00000147381; HLA-A*68:02;
TSYVKVLEHV

SEQ ID NO: 107768 - protein, 9 aa, Homo sapiens
  misc_feature (1)..(9): Table A2; Target 4926; MAGEA4; ENSG00000147381; HLA-A*03:01;
TSYVKVLEH

SEQ ID NO: 107769 - protein, 9 aa, Homo sapiens
  misc_feature (1)..(9): Table A2; Target 4927; MAGEA4; ENSG00000147381; HLA-A*11:01;
TSYVKVLEH

SEQ ID NO: 107770 - protein, 9 aa, Homo sapiens
  misc_feature (1)..(9): Table A2; Target 4928; MAGEA4; ENSG00000147381; HLA-C*02:02;
TSYVKVLEH

SEQ ID NO: 107771 - protein, 9 aa, Homo sapiens
  misc_feature (1)..(9): Table A2; Target 4929; MAGEA4; ENSG00000147381; HLA-C*07:06;
TSYVKVLEH

SEQ ID NO: 107772 - protein, 9 aa, Homo sapiens
  misc_feature (1)..(9): Table A2; Target 4930; MAGEA4; ENSG00000147381; HLA-C*12:03;
TSYVKVLEH

SEQ ID NO: 107773 - protein, 9 aa, Homo sapiens
  misc_feature (1)..(9): Table A2; Target 4931; MAGEA4; ENSG00000147381; HLA-C*05:01;
TTEEQEAAV

SEQ ID NO: 107774 - protein, 9 aa, Homo sapiens
  misc_feature (1)..(9): Table A2; Target 4932; MAGEA4; ENSG00000147381; HLA-A*31:01;
TTISFTCWR

SEQ ID NO: 107775 - protein, 8 aa, Homo sapiens
  misc_feature (1)..(8): Table A2; Target 4933; MAGEA4; ENSG00000147381; HLA-A*25:01;
TTISFTCW

SEQ ID NO: 107776 - protein, 8 aa, Homo sapiens
  misc_feature (1)..(8): Table A2; Target 4934; MAGEA4; ENSG00000147381; HLA-B*57:01;
TTISFTCW

SEQ ID NO: 107777 - protein, 9 aa, Homo sapiens
  misc_feature (1)..(9): Table A2; Target 4935; MAGEA4; ENSG00000147381; HLA-A*02:03;
TVYGEPRKL

SEQ ID NO: 107778 - protein, 9 aa, Homo sapiens
  misc_feature (1)..(9): Table A2; Target 4936; MAGEA4; ENSG00000147381; HLA-A*03:01;
TVYGEPRKL

SEQ ID NO: 107779 - protein, 9 aa, Homo sapiens
  misc_feature (1)..(9): Table A2; Target 4937; MAGEA4; ENSG00000147381; HLA-A*68:02;
TVYGEPRKL

SEQ ID NO: 107780 - protein, 9 aa, Homo sapiens
  misc_feature (1)..(9): Table A2; Target 4938; MAGEA4; ENSG00000147381; HLA-C*02:02;
TVYGEPRKL

SEQ ID NO: 107781 - protein, 9 aa, Homo sapiens
  misc_feature (1)..(9): Table A2; Target 4939; MAGEA4; ENSG00000147381; HLA-C*03:04;
TVYGEPRKL

SEQ ID NO: 107782 - protein, 9 aa, Homo sapiens
  misc_feature (1)..(9): Table A2; Target 4940; MAGEA4; ENSG00000147381; HLA-C*06:02;
TVYGEPRKL

SEQ ID NO: 107783 - protein, 9 aa, Homo sapiens
  misc_feature (1)..(9): Table A2; Target 4941; MAGEA4; ENSG00000147381; HLA-C*12:03;
TVYGEPRKL

SEQ ID NO: 107784 - protein, 8 aa, Homo sapiens
  misc_feature (1)..(8): Table A2; Target 4942; MAGEA4; ENSG00000147381; HLA-A*23:01;
TYTLVTCL

SEQ ID NO: 107785 - protein, 8 aa, Homo sapiens
  misc_feature (1)..(8): Table A2; Target 4943; MAGEA4; ENSG00000147381; HLA-A*24:02;
TYTLVTCL

SEQ ID NO: 107786 - protein, 8 aa, Homo sapiens
  misc_feature (1)..(8): Table A2; Target 4944; MAGEA4; ENSG00000147381; HLA-C*14:02;
TYTLVTCL

SEQ ID NO: 107787 - protein, 8 aa, Homo sapiens
  misc_feature (1)..(8): Table A2; Target 4945; MAGEA4; ENSG00000147381; HLA-B*37:01;
VDELAHFL

SEQ ID NO: 107788 - protein, 8 aa, Homo sapiens
  misc_feature (1)..(8): Table A2; Target 4946; MAGEA4; ENSG00000147381; HLA-B*40:02;
VDELAHFL

SEQ ID NO: 107789 - protein, 8 aa, Homo sapiens
  misc_feature (1)..(8): Table A2; Target 4947; MAGEA4; ENSG00000147381; HLA-C*07:04;
VDELAHFL

SEQ ID NO: 107790 - protein, 8 aa, Homo sapiens
  misc_feature (1)..(8): Table A2; Target 4948; MAGEA4; ENSG00000147381; HLA-B*15:03;
VDPASNTY

SEQ ID NO: 107791 - protein, 8 aa, Homo sapiens
  misc_feature (1)..(8): Table A2; Target 4949; MAGEA4; ENSG00000147381; HLA-B*37:01;
VDPASNTY

SEQ ID NO: 107792 - protein, 8 aa, Homo sapiens
  misc_feature (1)..(8): Table A2; Target 4950; MAGEA4; ENSG00000147381; HLA-B*39:01;
VDPASNTY

SEQ ID NO: 107793 - protein, 8 aa, Homo sapiens
  misc_feature (1)..(8): Table A2; Target 4951; MAGEA4; ENSG00000147381; HLA-C*01:02;
VDPASNTY

SEQ ID NO: 107794 - protein, 8 aa, Homo sapiens
  misc_feature (1)..(8): Table A2; Target 4952; MAGEA4; ENSG00000147381; HLA-C*04:01;
VDPASNTY

SEQ ID NO: 107795 - protein, 8 aa, Homo sapiens
  misc_feature (1)..(8): Table A2; Target 4953; MAGEA4; ENSG00000147381; HLA-C*07:01;
VDPASNTY

SEQ ID NO: 107796 - protein, 8 aa, Homo sapiens
  misc_feature (1)..(8): Table A2; Target 4954; MAGEA4; ENSG00000147381; HLA-C*12:03;
VDPASNTY

SEQ ID NO: 107797 - protein, 8 aa, Homo sapiens
  misc_feature (1)..(8): Table A2; Target 4955; MAGEA4; ENSG00000147381; HLA-C*14:02;
VDPASNTY

SEQ ID NO: 107798 - protein, 8 aa, Homo sapiens
  misc_feature (1)..(8): Table A2; Target 4956; MAGEA4; ENSG00000147381; HLA-C*16:02;
VDPASNTY

SEQ ID NO: 107799 - protein, 11 aa, Homo sapiens
  misc_feature (1)..(11): Table A2; Target 4957; MAGEA4; ENSG00000147381; HLA-B*49:01;
VEAQEEALGLV

SEQ ID NO: 107800 - protein, 10 aa, Homo sapiens
  misc_feature (1)..(10): Table A2; Target 4958; MAGEA4; ENSG00000147381; HLA-A*30:01;
VEAQEEALGL

SEQ ID NO: 107801 - protein, 10 aa, Homo sapiens
  misc_feature (1)..(10): Table A2; Target 4959; MAGEA4; ENSG00000147381; HLA-B*40:01;
VEAQEEALGL

SEQ ID NO: 107802 - protein, 8 aa, Homo sapiens
  misc_feature (1)..(8): Table A2; Target 4960; MAGEA4; ENSG00000147381; HLA-A*30:01;
VEAQEEAL

SEQ ID NO: 107803 - protein, 8 aa, Homo sapiens
  misc_feature (1)..(8): Table A2; Target 4961; MAGEA4; ENSG00000147381; HLA-B*40:01;
VEAQEEAL

SEQ ID NO: 107804 - protein, 11 aa, Homo sapiens
  misc_feature (1)..(11): Table A2; Target 4962; MAGEA4; ENSG00000147381; HLA-A*03:01;
VIFGKASESLK

SEQ ID NO: 107805 - protein, 11 aa, Homo sapiens
  misc_feature (1)..(11): Table A2; Target 4963; MAGEA4; ENSG00000147381; HLA-A*03:02;
VIFGKASESLK

SEQ ID NO: 107806 - protein, 11 aa, Homo sapiens
  misc_feature (1)..(11): Table A2; Target 4964; MAGEA4; ENSG00000147381; HLA-A*11:01;
VIFGKASESLK

SEQ ID NO: 107807 - protein, 10 aa, Homo sapiens
  misc_feature (1)..(10): Table A2; Target 4965; MAGEA4; ENSG00000147381; HLA-C*01:02;
VIFGKASESL

SEQ ID NO: 107808 - protein, 11 aa, Homo sapiens
  misc_feature (1)..(11): Table A2; Target 4966; MAGEA4; ENSG00000147381; HLA-B*15:03;
VKEVDPASNTY

SEQ ID NO: 107809 - protein, 9 aa, Homo sapiens
  misc_feature (1)..(9): Table A2; Target 4967; MAGEA4; ENSG00000147381; HLA-A*32:01;
VNARVRIAY

SEQ ID NO: 107810 - protein, 9 aa, Homo sapiens
  misc_feature (1)..(9): Table A2; Target 4968; MAGEA4; ENSG00000147381; HLA-C*16:01;
VNARVRIAY

SEQ ID NO: 107811 - protein, 11 aa, Homo sapiens
  misc_feature (1)..(11): Table A2; Target 4969; MAGEA4; ENSG00000147381; HLA-B*35:01;
VPGSNPARYEF

SEQ ID NO: 107812 - protein, 9 aa, Homo sapiens
  misc_feature (1)..(9): Table A2; Target 4970; MAGEA4; ENSG00000147381; HLA-A*29:02;
VPGSNPARY

SEQ ID NO: 107813 - protein, 9 aa, Homo sapiens
  misc_feature (1)..(9): Table A2; Target 4971; MAGEA4; ENSG00000147381; HLA-A*30:02;
VPGSNPARY

SEQ ID NO: 107814 - protein, 9 aa, Homo sapiens
  misc_feature (1)..(9): Table A2; Target 4972; MAGEA4; ENSG00000147381; HLA-B*35:01;
VPGSNPARY

SEQ ID NO: 107815 - protein, 9 aa, Homo sapiens
  misc_feature (1)..(9): Table A2; Target 4973; MAGEA4; ENSG00000147381; HLA-B*55:01;
VPGSNPARY

SEQ ID NO: 107816 - protein, 8 aa, Homo sapiens
  misc_feature (1)..(8): Table A2; Target 4974; MAGEA4; ENSG00000147381; HLA-B*56:01;
VPGTLEEV

SEQ ID NO: 107817 - protein, 8 aa, Homo sapiens
  misc_feature (1)..(8): Table A2; Target 4975; MAGEA4; ENSG00000147381; HLA-A*01:01;
VQENYLEY

SEQ ID NO: 107818 - protein, 8 aa, Homo sapiens
  misc_feature (1)..(8): Table A2; Target 4976; MAGEA4; ENSG00000147381; HLA-B*15:01;
VQENYLEY

SEQ ID NO: 107819 - protein, 8 aa, Homo sapiens
  misc_feature (1)..(8): Table A2; Target 4977; MAGEA4; ENSG00000147381; HLA-B*15:03;
VQENYLEY

SEQ ID NO: 107820 - protein, 8 aa, Homo sapiens
  misc_feature (1)..(8): Table A2; Target 4978; MAGEA4; ENSG00000147381; HLA-B*39:01;
VQENYLEY

SEQ ID NO: 107821 - protein, 8 aa, Homo sapiens
  misc_feature (1)..(8): Table A2; Target 4979; MAGEA4; ENSG00000147381; HLA-C*07:01;
VQENYLEY

SEQ ID NO: 107822 - protein, 9 aa, Homo sapiens
  misc_feature (1)..(9): Table A2; Target 4980; MAGEA4; ENSG00000147381; HLA-B*27:05;
VRIAYPSLR

SEQ ID NO: 107823 - protein, 8 aa, Homo sapiens
  misc_feature (1)..(8): Table A2; Target 4981; MAGEA4; ENSG00000147381; HLA-A*01:01;
VTCLGLSY

SEQ ID NO: 107824 - protein, 8 aa, Homo sapiens
  misc_feature (1)..(8): Table A2; Target 4982; MAGEA4; ENSG00000147381; HLA-C*07:01;
VTCLGLSY

SEQ ID NO: 107825 - protein, 9 aa, Homo sapiens
  misc_feature (1)..(9): Table A2; Target 4983; MAGEA4; ENSG00000147381; HLA-A*03:01;
VTKAEMLER

SEQ ID NO: 107826 - protein, 9 aa, Homo sapiens
  misc_feature (1)..(9): Table A2; Target 4984; MAGEA4; ENSG00000147381; HLA-A*11:01;
VTKAEMLER

SEQ ID NO: 107827 - protein, 9 aa, Homo sapiens
  misc_feature (1)..(9): Table A2; Target 4985; MAGEA4; ENSG00000147381; HLA-A*31:01;
VTKAEMLER

SEQ ID NO: 107828 - protein, 9 aa, Homo sapiens
  misc_feature (1)..(9): Table A2; Target 4986; MAGEA4; ENSG00000147381; HLA-A*33:01;
VTKAEMLER

SEQ ID NO: 107829 - protein, 9 aa, Homo sapiens
  misc_feature (1)..(9): Table A2; Target 4987; MAGEA4; ENSG00000147381; HLA-A*33:03;
VTKAEMLER

SEQ ID NO: 107830 - protein, 9 aa, Homo sapiens
  misc_feature (1)..(9): Table A2; Target 4988; MAGEA4; ENSG00000147381; HLA-A*68:01;
VTKAEMLER

SEQ ID NO: 107831 - protein, 9 aa, Homo sapiens
  misc_feature (1)..(9): Table A2; Target 4989; MAGEA4; ENSG00000147381; HLA-B*57:01;
VTKAEMLER

SEQ ID NO: 107832 - protein, 9 aa, Homo sapiens
  misc_feature (1)..(9): Table A2; Target 4990; MAGEA4; ENSG00000147381; HLA-C*07:06;
VTKAEMLER

SEQ ID NO: 107833 - protein, 10 aa, Homo sapiens
  misc_feature (1)..(10): Table A2; Target 4991; MAGEA4; ENSG00000147381; HLA-A*24:02;
VYDGREHTVY

SEQ ID NO: 107834 - protein, 10 aa, Homo sapiens
  misc_feature (1)..(10): Table A2; Target 4992; MAGEA4; ENSG00000147381; HLA-A*29:02;
VYDGREHTVY

SEQ ID NO: 107835 - protein, 10 aa, Homo sapiens
  misc_feature (1)..(10): Table A2; Target 4993; MAGEA4; ENSG00000147381; HLA-B*35:01;
VYDGREHTVY

SEQ ID NO: 107836 - protein, 10 aa, Homo sapiens
  misc_feature (1)..(10): Table A2; Target 4994; MAGEA4; ENSG00000147381; HLA-B*55:01;
VYDGREHTVY

SEQ ID NO: 107837 - protein, 10 aa, Homo sapiens
  misc_feature (1)..(10): Table A2; Target 4995; MAGEA4; ENSG00000147381; HLA-C*04:01;
VYDGREHTVY

SEQ ID NO: 107838 - protein, 10 aa, Homo sapiens
  misc_feature (1)..(10): Table A2; Target 4996; MAGEA4; ENSG00000147381; HLA-C*07:01;
VYDGREHTVY

SEQ ID NO: 107839 - protein, 9 aa, Homo sapiens
  misc_feature (1)..(9): Table A2; Target 4997; MAGEA4; ENSG00000147381; HLA-A*02:01;
VYDGREHTV

SEQ ID NO: 107840 - protein, 9 aa, Homo sapiens
  misc_feature (1)..(9): Table A2; Target 4998; MAGEA4; ENSG00000147381; HLA-A*02:07;
VYDGREHTV

SEQ ID NO: 107841 - protein, 9 aa, Homo sapiens
  misc_feature (1)..(9): Table A2; Target 4999; MAGEA4; ENSG00000147381; HLA-A*23:01;
VYDGREHTV

SEQ ID NO: 107842 - protein, 9 aa, Homo sapiens
  misc_feature (1)..(9): Table A2; Target 5000; MAGEA4; ENSG00000147381; HLA-A*24:02;
VYDGREHTV

SEQ ID NO: 107843 - protein, 9 aa, Homo sapiens
  misc_feature (1)..(9): Table A2; Target 5001; MAGEA4; ENSG00000147381; HLA-A*32:01;
VYDGREHTV

SEQ ID NO: 107844 - protein, 9 aa, Homo sapiens
  misc_feature (1)..(9): Table A2; Target 5002; MAGEA4; ENSG00000147381; HLA-B*08:01;
VYDGREHTV

SEQ ID NO: 107845 - protein, 9 aa, Homo sapiens
  misc_feature (1)..(9): Table A2; Target 5003; MAGEA4; ENSG00000147381; HLA-B*35:01;
VYDGREHTV

SEQ ID NO: 107846 - protein, 9 aa, Homo sapiens
  misc_feature (1)..(9): Table A2; Target 5004; MAGEA4; ENSG00000147381; HLA-B*35:03;
VYDGREHTV

SEQ ID NO: 107847 - protein, 9 aa, Homo sapiens
  misc_feature (1)..(9): Table A2; Target 5005; MAGEA4; ENSG00000147381; HLA-B*38:01;
VYDGREHTV

SEQ ID NO: 107848 - protein, 9 aa, Homo sapiens
  misc_feature (1)..(9): Table A2; Target 5006; MAGEA4; ENSG00000147381; HLA-B*51:01;
VYDGREHTV

SEQ ID NO: 107849 - protein, 9 aa, Homo sapiens
  misc_feature (1)..(9): Table A2; Target 5007; MAGEA4; ENSG00000147381; HLA-B*55:01;
VYDGREHTV

SEQ ID NO: 107850 - protein, 9 aa, Homo sapiens
  misc_feature (1)..(9): Table A2; Target 5008; MAGEA4; ENSG00000147381; HLA-C*01:02;
VYDGREHTV

SEQ ID NO: 107851 - protein, 9 aa, Homo sapiens
  misc_feature (1)..(9): Table A2; Target 5009; MAGEA4; ENSG00000147381; HLA-C*03:04;
VYDGREHTV

SEQ ID NO: 107852 - protein, 9 aa, Homo sapiens
  misc_feature (1)..(9): Table A2; Target 5010; MAGEA4; ENSG00000147381; HLA-C*04:01;
VYDGREHTV

SEQ ID NO: 107853 - protein, 9 aa, Homo sapiens
  misc_feature (1)..(9): Table A2; Target 5011; MAGEA4; ENSG00000147381; HLA-C*05:01;
VYDGREHTV

SEQ ID NO: 107854 - protein, 9 aa, Homo sapiens
  misc_feature (1)..(9): Table A2; Target 5012; MAGEA4; ENSG00000147381; HLA-C*14:02;
VYDGREHTV

SEQ ID NO: 107855 - protein, 9 aa, Homo sapiens
  misc_feature (1)..(9): Table A2; Target 5013; MAGEA4; ENSG00000147381; HLA-C*16:01;
VYDGREHTV

SEQ ID NO: 107856 - protein, 9 aa, Homo sapiens
  misc_feature (1)..(9): Table A2; Target 5014; MAGEA4; ENSG00000147381; HLA-C*16:02;
VYDGREHTV

SEQ ID NO: 107857 - protein, 9 aa, Homo sapiens
  misc_feature (1)..(9): Table A2; Target 5015; MAGEA4; ENSG00000147381; HLA-A*23:01;
VYGEPRKLL

SEQ ID NO: 107858 - protein, 9 aa, Homo sapiens
  misc_feature (1)..(9): Table A2; Target 5016; MAGEA4; ENSG00000147381; HLA-A*24:02;
VYGEPRKLL

SEQ ID NO: 107859 - protein, 8 aa, Homo sapiens
  misc_feature (1)..(8): Table A2; Target 5017; MAGEA4; ENSG00000147381; HLA-A*23:01;
VYGEPRKL

SEQ ID NO: 107860 - protein, 8 aa, Homo sapiens
  misc_feature (1)..(8): Table A2; Target 5018; MAGEA4; ENSG00000147381; HLA-A*24:02;
VYGEPRKL

SEQ ID NO: 107861 - protein, 9 aa, Homo sapiens
  misc_feature (1)..(9): Table A2; Target 5019; MAGEA4; ENSG00000147381; HLA-B*40:02;
WEELGVMGV

SEQ ID NO: 107862 - protein, 9 aa, Homo sapiens
  misc_feature (1)..(9): Table A2; Target 5020; MAGEA4; ENSG00000147381; HLA-B*49:01;
WEELGVMGV

SEQ ID NO: 107863 - protein, 9 aa, Homo sapiens
  misc_feature (1)..(9): Table A2; Target 5021; MAGEA4; ENSG00000147381; HLA-A*01:01;
WVQENYLEY

SEQ ID NO: 107864 - protein, 9 aa, Homo sapiens
  misc_feature (1)..(9): Table A2; Target 5022; MAGEA4; ENSG00000147381; HLA-A*03:01;
WVQENYLEY

SEQ ID NO: 107865 - protein, 9 aa, Homo sapiens
  misc_feature (1)..(9): Table A2; Target 5023; MAGEA4; ENSG00000147381; HLA-A*25:01;
WVQENYLEY

SEQ ID NO: 107866 - protein, 9 aa, Homo sapiens
  misc_feature (1)..(9): Table A2; Target 5024; MAGEA4; ENSG00000147381; HLA-A*26:01;
WVQENYLEY

SEQ ID NO: 107867 - protein, 9 aa, Homo sapiens
  misc_feature (1)..(9): Table A2; Target 5025; MAGEA4; ENSG00000147381; HLA-A*29:02;
WVQENYLEY

SEQ ID NO: 107868 - protein, 9 aa, Homo sapiens
  misc_feature (1)..(9): Table A2; Target 5026; MAGEA4; ENSG00000147381; HLA-A*30:02;
WVQENYLEY

SEQ ID NO: 107869 - protein, 9 aa, Homo sapiens
  misc_feature (1)..(9): Table A2; Target 5027; MAGEA4; ENSG00000147381; HLA-B*15:01;
WVQENYLEY

SEQ ID NO: 107870 - protein, 9 aa, Homo sapiens
  misc_feature (1)..(9): Table A2; Target 5028; MAGEA4; ENSG00000147381; HLA-B*35:01;
WVQENYLEY

SEQ ID NO: 107871 - protein, 9 aa, Homo sapiens
  misc_feature (1)..(9): Table A2; Target 5029; MAGEA4; ENSG00000147381; HLA-B*46:01;
WVQENYLEY

SEQ ID NO: 107872 - protein, 9 aa, Homo sapiens
  misc_feature (1)..(9): Table A2; Target 5030; MAGEA4; ENSG00000147381; HLA-C*07:04;
WVQENYLEY

SEQ ID NO: 107873 - protein, 11 aa, Homo sapiens
  misc_feature (1)..(11): Table A2; Target 5031; MAGEA4; ENSG00000147381; HLA-C*07:01;
YDGLLGNNQIF

SEQ ID NO: 107874 - protein, 9 aa, Homo sapiens
  misc_feature (1)..(9): Table A2; Target 5032; MAGEA4; ENSG00000147381; HLA-A*01:01;
YDGREHTVY

SEQ ID NO: 107875 - protein, 9 aa, Homo sapiens
  misc_feature (1)..(9): Table A2; Target 5033; MAGEA4; ENSG00000147381; HLA-A*29:02;
YDGREHTVY

SEQ ID NO: 107876 - protein, 9 aa, Homo sapiens
  misc_feature (1)..(9): Table A2; Target 5034; MAGEA4; ENSG00000147381; HLA-C*07:01;
YDGREHTVY

SEQ ID NO: 107877 - protein, 8 aa, Homo sapiens
  misc_feature (1)..(8): Table A2; Target 5035; MAGEA4; ENSG00000147381; HLA-C*06:02;
YDGREHTV

SEQ ID NO: 107878 - protein, 8 aa, Homo sapiens
  misc_feature (1)..(8): Table A2; Target 5036; MAGEA4; ENSG00000147381; HLA-C*07:01;
YDGREHTV

SEQ ID NO: 107879 - protein, 8 aa, Homo sapiens
  misc_feature (1)..(8): Table A2; Target 5037; MAGEA4; ENSG00000147381; HLA-C*07:04;
YDGREHTV

SEQ ID NO: 107880 - protein, 9 aa, Homo sapiens
  misc_feature (1)..(9): Table A2; Target 5038; MAGEA4; ENSG00000147381; HLA-A*02:04;
YEFLWGPRA

SEQ ID NO: 107881 - protein, 10 aa, Homo sapiens
  misc_feature (1)..(10): Table A2; Target 5039; MAGEA4; ENSG00000147381; HLA-B*07:02;
YPSLREAALL

SEQ ID NO: 107882 - protein, 9 aa, Homo sapiens
  misc_feature (1)..(9): Table A2; Target 5040; MAGEA4; ENSG00000147381; HLA-B*07:02;
YPSLREAAL

SEQ ID NO: 107883 - protein, 9 aa, Homo sapiens
  misc_feature (1)..(9): Table A2; Target 5041; MAGEA4; ENSG00000147381; HLA-B*08:01;
YPSLREAAL

SEQ ID NO: 107884 - protein, 9 aa, Homo sapiens
  misc_feature (1)..(9): Table A2; Target 5042; MAGEA4; ENSG00000147381; HLA-B*35:01;
YPSLREAAL

SEQ ID NO: 107885 - protein, 9 aa, Homo sapiens
  misc_feature (1)..(9): Table A2; Target 5043; MAGEA4; ENSG00000147381; HLA-B*35:03;
YPSLREAAL

SEQ ID NO: 107886 - protein, 9 aa, Homo sapiens
  misc_feature (1)..(9): Table A2; Target 5044; MAGEA4; ENSG00000147381; HLA-B*37:01;
YPSLREAAL

SEQ ID NO: 107887 - protein, 9 aa, Homo sapiens
  misc_feature (1)..(9): Table A2; Target 5045; MAGEA4; ENSG00000147381; HLA-B*39:01;
YPSLREAAL

SEQ ID NO: 107888 - protein, 9 aa, Homo sapiens
  misc_feature (1)..(9): Table A2; Target 5046; MAGEA4; ENSG00000147381; HLA-B*40:01;
YPSLREAAL

SEQ ID NO: 107889 - protein, 9 aa, Homo sapiens
  misc_feature (1)..(9): Table A2; Target 5047; MAGEA4; ENSG00000147381; HLA-B*51:01;
YPSLREAAL

SEQ ID NO: 107890 - protein, 9 aa, Homo sapiens
  misc_feature (1)..(9): Table A2; Target 5048; MAGEA4; ENSG00000147381; HLA-B*54:01;
YPSLREAAL

SEQ ID NO: 107891 - protein, 9 aa, Homo sapiens
  misc_feature (1)..(9): Table A2; Target 5049; MAGEA4; ENSG00000147381; HLA-B*55:01;
YPSLREAAL

SEQ ID NO: 107892 - protein, 9 aa, Homo sapiens
  misc_feature (1)..(9): Table A2; Target 5050; MAGEA4; ENSG00000147381; HLA-B*56:01;
YPSLREAAL

SEQ ID NO: 107893 - protein, 9 aa, Homo sapiens
  misc_feature (1)..(9): Table A2; Target 5051; MAGEA4; ENSG00000147381; HLA-C*01:02;
YPSLREAAL

SEQ ID NO: 107894 - protein, 9 aa, Homo sapiens
  misc_feature (1)..(9): Table A2; Target 5052; MAGEA4; ENSG00000147381; HLA-C*03:03;
YPSLREAAL

SEQ ID NO: 107895 - protein, 9 aa, Homo sapiens
  misc_feature (1)..(9): Table A2; Target 5053; MAGEA4; ENSG00000147381; HLA-C*03:04;
YPSLREAAL

SEQ ID NO: 107896 - protein, 9 aa, Homo sapiens
  misc_feature (1)..(9): Table A2; Target 5054; MAGEA4; ENSG00000147381; HLA-C*07:02;
YPSLREAAL

SEQ ID NO: 107897 - protein, 9 aa, Homo sapiens
  misc_feature (1)..(9): Table A2; Target 5055; MAGEA4; ENSG00000147381; HLA-C*14:02;
YPSLREAAL

SEQ ID NO: 107898 - protein, 9 aa, Homo sapiens
  misc_feature (1)..(9): Table A2; Target 5056; MAGEA4; ENSG00000147381; HLA-C*16:01;
YPSLREAAL

SEQ ID NO: 107899 - protein, 8 aa, Homo sapiens
  misc_feature (1)..(8): Table A2; Target 5057; MAGEA4; ENSG00000147381; HLA-B*54:01;
YPSLREAA

SEQ ID NO: 107900 - protein, 8 aa, Homo sapiens
  misc_feature (1)..(8): Table A2; Target 5058; MAGEA4; ENSG00000147381; HLA-B*55:01;
YPSLREAA

SEQ ID NO: 107901 - protein, 8 aa, Homo sapiens
  misc_feature (1)..(8): Table A2; Target 5059; MAGEA4; ENSG00000147381; HLA-B*56:01;
YPSLREAA

SEQ ID NO: 107902 - protein, 9 aa, Homo sapiens
  misc_feature (1)..(9): Table A2; Target 5060; MAGEA4; ENSG00000147381; HLA-B*27:02;
YRAKELVTK

SEQ ID NO: 107903 - protein, 9 aa, Homo sapiens
  misc_feature (1)..(9): Table A2; Target 5061; MAGEA4; ENSG00000147381; HLA-B*27:05;
YRAKELVTK

SEQ ID NO: 107904 - protein, 9 aa, Homo sapiens
  misc_feature (1)..(9): Table A2; Target 5062; MAGEA4; ENSG00000147381; HLA-C*06:02;
YRAKELVTK

SEQ ID NO: 107905 - protein, 11 aa, Homo sapiens
  misc_feature (1)..(11): Table A2; Target 5063; MAGEA4; ENSG00000147381; HLA-B*27:05;
YRQVPGSNPAR

SEQ ID NO: 107906 - protein, 9 aa, Homo sapiens
  misc_feature (1)..(9): Table A2; Target 5064; MAGEA4; ENSG00000147381; HLA-B*27:05;
YRQVPGSNP

SEQ ID NO: 107907 - protein, 10 aa, Homo sapiens
  misc_feature (1)..(10): Table A2; Target 5065; MAGEA4; ENSG00000147381; HLA-A*31:01;
YVKVLEHVVR

SEQ ID NO: 107908 - protein, 10 aa, Homo sapiens
  misc_feature (1)..(10): Table A2; Target 5066; MAGEA4; ENSG00000147381; HLA-A*33:01;
YVKVLEHVVR

SEQ ID NO: 107909 - protein, 9 aa, Homo sapiens
  misc_feature (1)..(9): Table A2; Target 5067; MAGEA4; ENSG00000147381; HLA-A*02:01;
YVKVLEHVV

SEQ ID NO: 107910 - protein, 9 aa, Homo sapiens
  misc_feature (1)..(9): Table A2; Target 5068; MAGEA4; ENSG00000147381; HLA-A*02:03;
YVKVLEHVV

SEQ ID NO: 107911 - protein, 9 aa, Homo sapiens
  misc_feature (1)..(9): Table A2; Target 5069; MAGEA4; ENSG00000147381; HLA-A*02:04;
YVKVLEHVV

SEQ ID NO: 107912 - protein, 9 aa, Homo sapiens
  misc_feature (1)..(9): Table A2; Target 5070; MAGEA4; ENSG00000147381; HLA-A*02:07;
YVKVLEHVV

SEQ ID NO: 107913 - protein, 9 aa, Homo sapiens
  misc_feature (1)..(9): Table A2; Target 5071; MAGEA4; ENSG00000147381; HLA-A*24:02;
YVKVLEHVV

SEQ ID NO: 107914 - protein, 9 aa, Homo sapiens
  misc_feature (1)..(9): Table A2; Target 5072; MAGEA4; ENSG00000147381; HLA-A*30:01;
YVKVLEHVV

SEQ ID NO: 107915 - protein, 9 aa, Homo sapiens
  misc_feature (1)..(9): Table A2; Target 5073; MAGEA4; ENSG00000147381; HLA-A*32:01;
YVKVLEHVV

SEQ ID NO: 107916 - protein, 9 aa, Homo sapiens
  misc_feature (1)..(9): Table A2; Target 5074; MAGEA4; ENSG00000147381; HLA-A*68:02;
YVKVLEHVV

SEQ ID NO: 107917 - protein, 9 aa, Homo sapiens
  misc_feature (1)..(9): Table A2; Target 5075; MAGEA4; ENSG00000147381; HLA-B*08:01;
YVKVLEHVV

SEQ ID NO: 107918 - protein, 9 aa, Homo sapiens
  misc_feature (1)..(9): Table A2; Target 5076; MAGEA4; ENSG00000147381; HLA-B*13:02;
YVKVLEHVV

SEQ ID NO: 107919 - protein, 9 aa, Homo sapiens
  misc_feature (1)..(9): Table A2; Target 5077; MAGEA4; ENSG00000147381; HLA-B*40:02;
YVKVLEHVV

SEQ ID NO: 107920 - protein, 9 aa, Homo sapiens
  misc_feature (1)..(9): Table A2; Target 5078; MAGEA4; ENSG00000147381; HLA-B*51:01;
YVKVLEHVV

SEQ ID NO: 107921 - protein, 9 aa, Homo sapiens
  misc_feature (1)..(9): Table A2; Target 5079; MAGEA4; ENSG00000147381; HLA-B*54:01;
YVKVLEHVV

SEQ ID NO: 107922 - protein, 9 aa, Homo sapiens
  misc_feature (1)..(9): Table A2; Target 5080; MAGEA4; ENSG00000147381; HLA-C*02:02;
YVKVLEHVV

SEQ ID NO: 107923 - protein, 9 aa, Homo sapiens
  misc_feature (1)..(9): Table A2; Target 5081; MAGEA4; ENSG00000147381; HLA-C*04:01;
YVKVLEHVV

SEQ ID NO: 107924 - protein, 9 aa, Homo sapiens
  misc_feature (1)..(9): Table A2; Target 5082; MAGEA4; ENSG00000147381; HLA-C*07:01;
YVKVLEHVV

SEQ ID NO: 107925 - protein, 9 aa, Homo sapiens
  misc_feature (1)..(9): Table A2; Target 5083; MAGEA4; ENSG00000147381; HLA-C*07:04;
YVKVLEHVV

SEQ ID NO: 107926 - protein, 9 aa, Homo sapiens
  misc_feature (1)..(9): Table A2; Target 5084; MAGEA4; ENSG00000147381; HLA-C*12:03;
YVKVLEHVV

SEQ ID NO: 107927 - protein, 9 aa, Homo sapiens
  misc_feature (1)..(9): Table A2; Target 5085; MAGEA4; ENSG00000147381; HLA-C*16:02;
YVKVLEHVV

SEQ ID NO: 107928 - protein, 8 aa, Homo sapiens
  misc_feature (1)..(8): Table A2; Target 5086; MAGEA4; ENSG00000147381; HLA-A*02:03;
YVKVLEHV

SEQ ID NO: 107929 - protein, 8 aa, Homo sapiens
  misc_feature (1)..(8): Table A2; Target 5087; MAGEA4; ENSG00000147381; HLA-B*08:01;
YVKVLEHV

SEQ ID NO: 107930 - protein, 8 aa, Homo sapiens
  misc_feature (1)..(8): Table A2; Target 5088; MAGEA4; ENSG00000147381; HLA-B*54:01;
YVKVLEHV

SEQ ID NO: 107931 - protein, 9 aa, Homo sapiens
  misc_feature (1)..(9): Table A2; Target 5089; NY-ESO1; ENSG00000184033; HLA-A*01:01;
AADHRQLQL

SEQ ID NO: 107932 - protein, 9 aa, Homo sapiens
  misc_feature (1)..(9): Table A2; Target 5090; NY-ESO1; ENSG00000184033; HLA-A*02:07;
AADHRQLQL

SEQ ID NO: 107933 - protein, 9 aa, Homo sapiens
  misc_feature (1)..(9): Table A2; Target 5091; NY-ESO1; ENSG00000184033; HLA-B*07:02;
AADHRQLQL

SEQ ID NO: 107934 - protein, 9 aa, Homo sapiens
  misc_feature (1)..(9): Table A2; Target 5092; NY-ESO1; ENSG00000184033; HLA-B*08:01;
AADHRQLQL

SEQ ID NO: 107935 - protein, 9 aa, Homo sapiens
  misc_feature (1)..(9): Table A2; Target 5093; NY-ESO1; ENSG00000184033; HLA-B*38:01;
AADHRQLQL

SEQ ID NO: 107936 - protein, 9 aa, Homo sapiens
  misc_feature (1)..(9): Table A2; Target 5094; NY-ESO1; ENSG00000184033; HLA-B*40:01;
AADHRQLQL

SEQ ID NO: 107937 - protein, 9 aa, Homo sapiens
  misc_feature (1)..(9): Table A2; Target 5095; NY-ESO1; ENSG00000184033; HLA-B*58:01;
AADHRQLQL

SEQ ID NO: 107938 - protein, 9 aa, Homo sapiens
  misc_feature (1)..(9): Table A2; Target 5096; NY-ESO1; ENSG00000184033; HLA-C*01:02;
AADHRQLQL

SEQ ID NO: 107939 - protein, 9 aa, Homo sapiens
  misc_feature (1)..(9): Table A2; Target 5097; NY-ESO1; ENSG00000184033; HLA-C*03:03;
AADHRQLQL

SEQ ID NO: 107940 - protein, 9 aa, Homo sapiens
  misc_feature (1)..(9): Table A2; Target 5098; NY-ESO1; ENSG00000184033; HLA-C*03:04;
AADHRQLQL

SEQ ID NO: 107941 - protein, 9 aa, Homo sapiens
  misc_feature (1)..(9): Table A2; Target 5099; NY-ESO1; ENSG00000184033; HLA-C*05:01;
AADHRQLQL

SEQ ID NO: 107942 - protein, 9 aa, Homo sapiens
  misc_feature (1)..(9): Table A2; Target 5100; NY-ESO1; ENSG00000184033; HLA-C*07:02;
AADHRQLQL

SEQ ID NO: 107943 - protein, 9 aa, Homo sapiens
  misc_feature (1)..(9): Table A2; Target 5101; NY-ESO1; ENSG00000184033; HLA-C*16:01;
AADHRQLQL

SEQ ID NO: 107944 - protein, 9 aa, Homo sapiens
  misc_feature (1)..(9): Table A2; Target 5102; NY-ESO1; ENSG00000184033; HLA-C*16:02;
AADHRQLQL

SEQ ID NO: 107945 - protein, 9 aa, Homo sapiens
  misc_feature (1)..(9): Table A2; Target 5103; NY-ESO1; ENSG00000184033; HLA-A*30:01;
ADGPGGPGI

SEQ ID NO: 107946 - protein, 9 aa, Homo sapiens
  misc_feature (1)..(9): Table A2; Target 5104; NY-ESO1; ENSG00000184033; HLA-B*37:01;
ADGPGGPGI

SEQ ID NO: 107947 - protein, 9 aa, Homo sapiens
  misc_feature (1)..(9): Table A2; Target 5105; NY-ESO1; ENSG00000184033; HLA-B*38:01;
ADGPGGPGI

SEQ ID NO: 107948 - protein, 9 aa, Homo sapiens
  misc_feature (1)..(9): Table A2; Target 5106; NY-ESO1; ENSG00000184033; HLA-B*44:02;
ADGPGGPGI

SEQ ID NO: 107949 - protein, 9 aa, Homo sapiens
  misc_feature (1)..(9): Table A2; Target 5107; NY-ESO1; ENSG00000184033; HLA-B*44:03;
ADGPGGPGI

SEQ ID NO: 107950 - protein, 9 aa, Homo sapiens
  misc_feature (1)..(9): Table A2; Target 5108; NY-ESO1; ENSG00000184033; HLA-B*49:01;
ADGPGGPGI

SEQ ID NO: 107951 - protein, 8 aa, Homo sapiens
  misc_feature (1)..(8): Table A2; Target 5109; NY-ESO1; ENSG00000184033; HLA-A*30:01;
ADHRQLQL

SEQ ID NO: 107952 - protein, 8 aa, Homo sapiens
  misc_feature (1)..(8): Table A2; Target 5110; NY-ESO1; ENSG00000184033; HLA-B*37:01;
ADHRQLQL

SEQ ID NO: 107953 - protein, 8 aa, Homo sapiens
  misc_feature (1)..(8): Table A2; Target 5111; NY-ESO1; ENSG00000184033; HLA-B*40:02;
ADHRQLQL

SEQ ID NO: 107954 - protein, 8 aa, Homo sapiens
  misc_feature (1)..(8): Table A2; Target 5112; NY-ESO1; ENSG00000184033; HLA-C*06:02;
ADHRQLQL

SEQ ID NO: 107955 - protein, 8 aa, Homo sapiens
  misc_feature (1)..(8): Table A2; Target 5113; NY-ESO1; ENSG00000184033; HLA-C*07:04;
ADHRQLQL

SEQ ID NO: 107956 - protein, 10 aa, Homo sapiens
  misc_feature (1)..(10): Table A2; Target 5114; NY-ESO1; ENSG00000184033; HLA-B*40:01;
AEGRGTGGST

SEQ ID NO: 107957 - protein, 11 aa, Homo sapiens
  misc_feature (1)..(11): Table A2; Target 5115; NY-ESO1; ENSG00000184033; HLA-C*04:01;
AGAARASGPGG

SEQ ID NO: 107958 - protein, 9 aa, Homo sapiens
  misc_feature (1)..(9): Table A2; Target 5116; NY-ESO1; ENSG00000184033; HLA-A*32:01;
AGAARASGP

SEQ ID NO: 107959 - protein, 9 aa, Homo sapiens
  misc_feature (1)..(9): Table A2; Target 5117; NY-ESO1; ENSG00000184033; HLA-C*07:04;
AGAARASGP

SEQ ID NO: 107960 - protein, 9 aa, Homo sapiens
  misc_feature (1)..(9): Table A2; Target 5118; NY-ESO1; ENSG00000184033; HLA-C*16:01;
AGAARASGP

SEQ ID NO: 107961 - protein, 9 aa, Homo sapiens
  misc_feature (1)..(9): Table A2; Target 5119; NY-ESO1; ENSG00000184033; HLA-C*16:02;
AGAARASGP

SEQ ID NO: 107962 - protein, 9 aa, Homo sapiens
  misc_feature (1)..(9): Table A2; Target 5120; NY-ESO1; ENSG00000184033; HLA-C*16:01;
AGATGGRGP

SEQ ID NO: 107963 - protein, 10 aa, Homo sapiens
  misc_feature (1)..(10): Table A2; Target 5121; NY-ESO1; ENSG00000184033; HLA-A*02:01;
AMPFATPMEA

SEQ ID NO: 107964 - protein, 10 aa, Homo sapiens
  misc_feature (1)..(10): Table A2; Target 5122; NY-ESO1; ENSG00000184033; HLA-A*02:03;
AMPFATPMEA

SEQ ID NO: 107965 - protein, 10 aa, Homo sapiens
  misc_feature (1)..(10): Table A2; Target 5123; NY-ESO1; ENSG00000184033; HLA-A*02:07;
AMPFATPMEA

SEQ ID NO: 107966 - protein, 8 aa, Homo sapiens
  misc_feature (1)..(8): Table A2; Target 5124; NY-ESO1; ENSG00000184033; HLA-C*01:02;
AMPFATPM

SEQ ID NO: 107967 - protein, 11 aa, Homo sapiens
  misc_feature (1)..(11): Table A2; Target 5125; NY-ESO1; ENSG00000184033; HLA-B*07:02;
APPLPVPGVLL

SEQ ID NO: 107968 - protein, 10 aa, Homo sapiens
  misc_feature (1)..(10): Table A2; Target 5126; NY-ESO1; ENSG00000184033; HLA-B*07:02;
APPLPVPGVL

SEQ ID NO: 107969 - protein, 10 aa, Homo sapiens
  misc_feature (1)..(10): Table A2; Target 5127; NY-ESO1; ENSG00000184033; HLA-B*56:01;
APPLPVPGVL

SEQ ID NO: 107970 - protein, 10 aa, Homo sapiens
  misc_feature (1)..(10): Table A2; Target 5128; NY-ESO1; ENSG00000184033; HLA-C*07:02;
APPLPVPGVL

SEQ ID NO: 107971 - protein, 9 aa, Homo sapiens
  misc_feature (1)..(9): Table A2; Target 5129; NY-ESO1; ENSG00000184033; HLA-A*02:07;
APPLPVPGV

SEQ ID NO: 107972 - protein, 9 aa, Homo sapiens
  misc_feature (1)..(9): Table A2; Target 5130; NY-ESO1; ENSG00000184033; HLA-B*07:02;
APPLPVPGV

SEQ ID NO: 107973 - protein, 9 aa, Homo sapiens
  misc_feature (1)..(9): Table A2; Target 5131; NY-ESO1; ENSG00000184033; HLA-B*13:02;
APPLPVPGV

SEQ ID NO: 107974 - protein, 9 aa, Homo sapiens
  misc_feature (1)..(9): Table A2; Target 5132; NY-ESO1; ENSG00000184033; HLA-B*37:01;
APPLPVPGV

SEQ ID NO: 107975 - protein, 9 aa, Homo sapiens
  misc_feature (1)..(9): Table A2; Target 5133; NY-ESO1; ENSG00000184033; HLA-B*51:01;
APPLPVPGV

SEQ ID NO: 107976 - protein, 9 aa, Homo sapiens
  misc_feature (1)..(9): Table A2; Target 5134; NY-ESO1; ENSG00000184033; HLA-B*54:01;
APPLPVPGV

SEQ ID NO: 107977 - protein, 9 aa, Homo sapiens
  misc_feature (1)..(9): Table A2; Target 5135; NY-ESO1; ENSG00000184033; HLA-B*55:01;
APPLPVPGV

SEQ ID NO: 107978 - protein, 9 aa, Homo sapiens
  misc_feature (1)..(9): Table A2; Target 5136; NY-ESO1; ENSG00000184033; HLA-B*56:01;
APPLPVPGV

SEQ ID NO: 107979 - protein, 9 aa, Homo sapiens
  misc_feature (1)..(9): Table A2; Target 5137; NY-ESO1; ENSG00000184033; HLA-C*04:01;
APPLPVPGV

SEQ ID NO: 107980 - protein, 9 aa, Homo sapiens
  misc_feature (1)..(9): Table A2; Target 5138; NY-ESO1; ENSG00000184033; HLA-C*07:02;
APPLPVPGV

SEQ ID NO: 107981 - protein, 11 aa, Homo sapiens
  misc_feature (1)..(11): Table A2; Target 5139; NY-ESO1; ENSG00000184033; HLA-B*07:02;
APRGPHGGAAS

SEQ ID NO: 107982 - protein, 11 aa, Homo sapiens
  misc_feature (1)..(11): Table A2; Target 5140; NY-ESO1; ENSG00000184033; HLA-C*07:02;
APRGPHGGAAS

SEQ ID NO: 107983 - protein, 10 aa, Homo sapiens
  misc_feature (1)..(10): Table A2; Target 5141; NY-ESO1; ENSG00000184033; HLA-B*07:02;
APRGPHGGAA

SEQ ID NO: 107984 - protein, 10 aa, Homo sapiens
  misc_feature (1)..(10): Table A2; Target 5142; NY-ESO1; ENSG00000184033; HLA-B*54:01;
APRGPHGGAA

SEQ ID NO: 107985 - protein, 10 aa, Homo sapiens
  misc_feature (1)..(10): Table A2; Target 5143; NY-ESO1; ENSG00000184033; HLA-B*55:01;
APRGPHGGAA

SEQ ID NO: 107986 - protein, 10 aa, Homo sapiens
  misc_feature (1)..(10): Table A2; Target 5144; NY-ESO1; ENSG00000184033; HLA-B*56:01;
APRGPHGGAA

SEQ ID NO: 107987 - protein, 10 aa, Homo sapiens
  misc_feature (1)..(10): Table A2; Target 5145; NY-ESO1; ENSG00000184033; HLA-C*07:02;
APRGPHGGAA

SEQ ID NO: 107988 - protein, 9 aa, Homo sapiens
  misc_feature (1)..(9): Table A2; Target 5146; NY-ESO1; ENSG00000184033; HLA-B*07:02;
APRGPHGGA

SEQ ID NO: 107989 - protein, 9 aa, Homo sapiens
  misc_feature (1)..(9): Table A2; Target 5147; NY-ESO1; ENSG00000184033; HLA-B*54:01;
APRGPHGGA

SEQ ID NO: 107990 - protein, 9 aa, Homo sapiens
  misc_feature (1)..(9): Table A2; Target 5148; NY-ESO1; ENSG00000184033; HLA-B*55:01;
APRGPHGGA

SEQ ID NO: 107991 - protein, 9 aa, Homo sapiens
  misc_feature (1)..(9): Table A2; Target 5149; NY-ESO1; ENSG00000184033; HLA-B*56:01;
APRGPHGGA

SEQ ID NO: 107992 - protein, 9 aa, Homo sapiens
  misc_feature (1)..(9): Table A2; Target 5150; NY-ESO1; ENSG00000184033; HLA-C*07:02;
APRGPHGGA

SEQ ID NO: 107993 - protein, 11 aa, Homo sapiens
  misc_feature (1)..(11): Table A2; Target 5151; NY-ESO1; ENSG00000184033; HLA-B*27:05;
AQDAPPLPVPG

SEQ ID NO: 107994 - protein, 9 aa, Homo sapiens
  misc_feature (1)..(9): Table A2; Target 5152; NY-ESO1; ENSG00000184033; HLA-A*01:01;
AQDAPPLPV

SEQ ID NO: 107995 - protein, 9 aa, Homo sapiens
  misc_feature (1)..(9): Table A2; Target 5153; NY-ESO1; ENSG00000184033; HLA-A*02:01;
AQDAPPLPV

SEQ ID NO: 107996 - protein, 9 aa, Homo sapiens
  misc_feature (1)..(9): Table A2; Target 5154; NY-ESO1; ENSG00000184033; HLA-A*02:03;
AQDAPPLPV

SEQ ID NO: 107997 - protein, 9 aa, Homo sapiens
  misc_feature (1)..(9): Table A2; Target 5155; NY-ESO1; ENSG00000184033; HLA-A*02:07;
AQDAPPLPV

SEQ ID NO: 107998 - protein, 9 aa, Homo sapiens
  misc_feature (1)..(9): Table A2; Target 5156; NY-ESO1; ENSG00000184033; HLA-A*03:01;
AQDAPPLPV

SEQ ID NO: 107999 - protein, 9 aa, Homo sapiens
  misc_feature (1)..(9): Table A2; Target 5157; NY-ESO1; ENSG00000184033; HLA-A*11:01;
AQDAPPLPV

SEQ ID NO: 108000 - protein, 9 aa, Homo sapiens
  misc_feature (1)..(9): Table A2; Target 5158; NY-ESO1; ENSG00000184033; HLA-A*30:01;
AQDAPPLPV

SEQ ID NO: 108001 - protein, 9 aa, Homo sapiens
  misc_feature (1)..(9): Table A2; Target 5159; NY-ESO1; ENSG00000184033; HLA-B*13:02;
AQDAPPLPV

SEQ ID NO: 108002 - protein, 9 aa, Homo sapiens
  misc_feature (1)..(9): Table A2; Target 5160; NY-ESO1; ENSG00000184033; HLA-B*27:05;
AQDAPPLPV

SEQ ID NO: 108003 - protein, 9 aa, Homo sapiens
  misc_feature (1)..(9): Table A2; Target 5161; NY-ESO1; ENSG00000184033; HLA-B*37:01;
AQDAPPLPV

SEQ ID NO: 108004 - protein, 9 aa, Homo sapiens
  misc_feature (1)..(9): Table A2; Target 5162; NY-ESO1; ENSG00000184033; HLA-B*38:01;
AQDAPPLPV

SEQ ID NO: 108005 - protein, 9 aa, Homo sapiens
  misc_feature (1)..(9): Table A2; Target 5163; NY-ESO1; ENSG00000184033; HLA-B*39:01;
AQDAPPLPV

SEQ ID NO: 108006 - protein, 9 aa, Homo sapiens
  misc_feature (1)..(9): Table A2; Target 5164; NY-ESO1; ENSG00000184033; HLA-B*49:01;
AQDAPPLPV

SEQ ID NO: 108007 - protein, 9 aa, Homo sapiens
  misc_feature (1)..(9): Table A2; Target 5165; NY-ESO1; ENSG00000184033; HLA-B*55:01;
AQDAPPLPV

SEQ ID NO: 108008 - protein, 9 aa, Homo sapiens
  misc_feature (1)..(9): Table A2; Target 5166; NY-ESO1; ENSG00000184033; HLA-C*02:02;
AQDAPPLPV

SEQ ID NO: 108009 - protein, 9 aa, Homo sapiens
  misc_feature (1)..(9): Table A2; Target 5167; NY-ESO1; ENSG00000184033; HLA-C*03:03;
AQDAPPLPV

SEQ ID NO: 108010 - protein, 9 aa, Homo sapiens
  misc_feature (1)..(9): Table A2; Target 5168; NY-ESO1; ENSG00000184033; HLA-C*03:04;
AQDAPPLPV

SEQ ID NO: 108011 - protein, 9 aa, Homo sapiens
  misc_feature (1)..(9): Table A2; Target 5169; NY-ESO1; ENSG00000184033; HLA-C*05:01;
AQDAPPLPV

SEQ ID NO: 108012 - protein, 9 aa, Homo sapiens
  misc_feature (1)..(9): Table A2; Target 5170; NY-ESO1; ENSG00000184033; HLA-C*06:02;
AQDAPPLPV

SEQ ID NO: 108013 - protein, 9 aa, Homo sapiens
  misc_feature (1)..(9): Table A2; Target 5171; NY-ESO1; ENSG00000184033; HLA-A*31:01;
AQPPSGQRR

SEQ ID NO: 108014 - protein, 9 aa, Homo sapiens
  misc_feature (1)..(9): Table A2; Target 5172; NY-ESO1; ENSG00000184033; HLA-A*32:01;
AQPPSGQRR

SEQ ID NO: 108015 - protein, 9 aa, Homo sapiens
  misc_feature (1)..(9): Table A2; Target 5173; NY-ESO1; ENSG00000184033; HLA-B*27:05;
AQPPSGQRR

SEQ ID NO: 108016 - protein, 9 aa, Homo sapiens
  misc_feature (1)..(9): Table A2; Target 5174; NY-ESO1; ENSG00000184033; HLA-C*06:02;
AQPPSGQRR

SEQ ID NO: 108017 - protein, 9 aa, Homo sapiens
  misc_feature (1)..(9): Table A2; Target 5175; NY-ESO1; ENSG00000184033; HLA-C*07:02;
AQPPSGQRR

SEQ ID NO: 108018 - protein, 11 aa, Homo sapiens
  misc_feature (1)..(11): Table A2; Target 5176; NY-ESO1; ENSG00000184033; HLA-B*27:05;
ARASGPGGGAP

SEQ ID NO: 108019 - protein, 11 aa, Homo sapiens
  misc_feature (1)..(11): Table A2; Target 5177; NY-ESO1; ENSG00000184033; HLA-B*39:01;
ARASGPGGGAP

SEQ ID NO: 108020 - protein, 10 aa, Homo sapiens
  misc_feature (1)..(10): Table A2; Target 5178; NY-ESO1; ENSG00000184033; HLA-B*27:05;
ARASGPGGGA

SEQ ID NO: 108021 - protein, 11 aa, Homo sapiens
  misc_feature (1)..(11): Table A2; Target 5179; NY-ESO1; ENSG00000184033; HLA-C*16:04;
ARGPESRLLEF

SEQ ID NO: 108022 - protein, 9 aa, Homo sapiens
  misc_feature (1)..(9): Table A2; Target 5180; NY-ESO1; ENSG00000184033; HLA-B*07:02;
ARGPESRLL

SEQ ID NO: 108023 - protein, 9 aa, Homo sapiens
  misc_feature (1)..(9): Table A2; Target 5181; NY-ESO1; ENSG00000184033; HLA-B*27:05;
ARGPESRLL

SEQ ID NO: 108024 - protein, 9 aa, Homo sapiens
  misc_feature (1)..(9): Table A2; Target 5182; NY-ESO1; ENSG00000184033; HLA-C*06:02;
ARGPESRLL

SEQ ID NO: 108025 - protein, 9 aa, Homo sapiens
  misc_feature (1)..(9): Table A2; Target 5183; NY-ESO1; ENSG00000184033; HLA-C*07:01;
ARGPESRLL

SEQ ID NO: 108026 - protein, 9 aa, Homo sapiens
  misc_feature (1)..(9): Table A2; Target 5184; NY-ESO1; ENSG00000184033; HLA-C*07:02;
ARGPESRLL

SEQ ID NO: 108027 - protein, 10 aa, Homo sapiens
  misc_feature (1)..(10): Table A2; Target 5185; NY-ESO1; ENSG00000184033; HLA-A*01:01;
ASGPGGGAPR

SEQ ID NO: 108028 - protein, 10 aa, Homo sapiens
  misc_feature (1)..(10): Table A2; Target 5186; NY-ESO1; ENSG00000184033; HLA-A*03:02;
ASGPGGGAPR

SEQ ID NO: 108029 - protein, 10 aa, Homo sapiens
  misc_feature (1)..(10): Table A2; Target 5187; NY-ESO1; ENSG00000184033; HLA-A*11:01;
ASGPGGGAPR

SEQ ID NO: 108030 - protein, 10 aa, Homo sapiens
  misc_feature (1)..(10): Table A2; Target 5188; NY-ESO1; ENSG00000184033; HLA-A*30:02;
ASGPGGGAPR

SEQ ID NO: 108031 - protein, 10 aa, Homo sapiens
  misc_feature (1)..(10): Table A2; Target 5189; NY-ESO1; ENSG00000184033; HLA-A*31:01;
ASGPGGGAPR

SEQ ID NO: 108032 - protein, 10 aa, Homo sapiens
  misc_feature (1)..(10): Table A2; Target 5190; NY-ESO1; ENSG00000184033; HLA-A*33:01;
ASGPGGGAPR

SEQ ID NO: 108033 - protein, 10 aa, Homo sapiens
  misc_feature (1)..(10): Table A2; Target 5191; NY-ESO1; ENSG00000184033; HLA-A*33:03;
ASGPGGGAPR

SEQ ID NO: 108034 - protein, 10 aa, Homo sapiens
  misc_feature (1)..(10): Table A2; Target 5192; NY-ESO1; ENSG00000184033; HLA-A*68:01;
ASGPGGGAPR

SEQ ID NO: 108035 - protein, 10 aa, Homo sapiens
  misc_feature (1)..(10): Table A2; Target 5193; NY-ESO1; ENSG00000184033; HLA-B*27:05;
ASGPGGGAPR

SEQ ID NO: 108036 - protein, 10 aa, Homo sapiens
  misc_feature (1)..(10): Table A2; Target 5194; NY-ESO1; ENSG00000184033; HLA-C*01:02;
ASGPGGGAPR

SEQ ID NO: 108037 - protein, 10 aa, Homo sapiens
  misc_feature (1)..(10): Table A2; Target 5195; NY-ESO1; ENSG00000184033; HLA-C*07:04;
ASGPGGGAPR

SEQ ID NO: 108038 - protein, 10 aa, Homo sapiens
  misc_feature (1)..(10): Table A2; Target 5196; NY-ESO1; ENSG00000184033; HLA-C*07:06;
ASGPGGGAPR

SEQ ID NO: 108039 - protein, 11 aa, Homo sapiens
  misc_feature (1)..(11): Table A2; Target 5197; NY-ESO1; ENSG00000184033; HLA-A*11:01;
ATPMEAELARR

SEQ ID NO: 108040 - protein, 10 aa, Homo sapiens
  misc_feature (1)..(10): Table A2; Target 5198; NY-ESO1; ENSG00000184033; HLA-C*07:06;
ATPMEAELAR

SEQ ID NO: 108041 - protein, 8 aa, Homo sapiens
  misc_feature (1)..(8): Table A2; Target 5199; NY-ESO1; ENSG00000184033; HLA-C*01:02;
ATPMEAEL

SEQ ID NO: 108042 - protein, 10 aa, Homo sapiens
  misc_feature (1)..(10): Table A2; Target 5200; NY-ESO1; ENSG00000184033; HLA-B*38:01;
DADGPGGPGI

SEQ ID NO: 108043 - protein, 10 aa, Homo sapiens
  misc_feature (1)..(10): Table A2; Target 5201; NY-ESO1; ENSG00000184033; HLA-B*51:01;
DADGPGGPGI

SEQ ID NO: 108044 - protein, 10 aa, Homo sapiens
  misc_feature (1)..(10): Table A2; Target 5202; NY-ESO1; ENSG00000184033; HLA-C*05:01;
DADGPGGPGI

SEQ ID NO: 108045 - protein, 10 aa, Homo sapiens
  misc_feature (1)..(10): Table A2; Target 5203; NY-ESO1; ENSG00000184033; HLA-A*26:01;
DAPPLPVPGV

SEQ ID NO: 108046 - protein, 10 aa, Homo sapiens
  misc_feature (1)..(10): Table A2; Target 5204; NY-ESO1; ENSG00000184033; HLA-B*51:01;
DAPPLPVPGV

SEQ ID NO: 108047 - protein, 8 aa, Homo sapiens
  misc_feature (1)..(8): Table A2; Target 5205; NY-ESO1; ENSG00000184033; HLA-B*51:01;
DAPPLPVP

SEQ ID NO: 108048 - protein, 8 aa, Homo sapiens
  misc_feature (1)..(8): Table A2; Target 5206; NY-ESO1; ENSG00000184033; HLA-B*51:01;
DGPGGPGI

SEQ ID NO: 108049 - protein, 9 aa, Homo sapiens
  misc_feature (1)..(9): Table A2; Target 5207; NY-ESO1; ENSG00000184033; HLA-B*51:01;
DHRQLQLSI

SEQ ID NO: 108050 - protein, 9 aa, Homo sapiens
  misc_feature (1)..(9): Table A2; Target 5208; NY-ESO1; ENSG00000184033; HLA-B*07:02;
EAELARRSL

SEQ ID NO: 108051 - protein, 9 aa, Homo sapiens
  misc_feature (1)..(9): Table A2; Target 5209; NY-ESO1; ENSG00000184033; HLA-B*08:01;
EAELARRSL

SEQ ID NO: 108052 - protein, 9 aa, Homo sapiens
  misc_feature (1)..(9): Table A2; Target 5210; NY-ESO1; ENSG00000184033; HLA-C*01:02;
EAELARRSL

SEQ ID NO: 108053 - protein, 9 aa, Homo sapiens
  misc_feature (1)..(9): Table A2; Target 5211; NY-ESO1; ENSG00000184033; HLA-C*03:03;
EAELARRSL

SEQ ID NO: 108054 - protein, 9 aa, Homo sapiens
  misc_feature (1)..(9): Table A2; Target 5212; NY-ESO1; ENSG00000184033; HLA-C*03:04;
EAELARRSL

SEQ ID NO: 108055 - protein, 9 aa, Homo sapiens
  misc_feature (1)..(9): Table A2; Target 5213; NY-ESO1; ENSG00000184033; HLA-C*07:02;
EAELARRSL

SEQ ID NO: 108056 - protein, 9 aa, Homo sapiens
  misc_feature (1)..(9): Table A2; Target 5214; NY-ESO1; ENSG00000184033; HLA-C*16:01;
EAELARRSL

SEQ ID NO: 108057 - protein, 9 aa, Homo sapiens
  misc_feature (1)..(9): Table A2; Target 5215; NY-ESO1; ENSG00000184033; HLA-C*14:02;
EFTVSGNIL

SEQ ID NO: 108058 - protein, 8 aa, Homo sapiens
  misc_feature (1)..(8): Table A2; Target 5216; NY-ESO1; ENSG00000184033; HLA-C*07:01;
EFYLAMPF

SEQ ID NO: 108059 - protein, 9 aa, Homo sapiens
  misc_feature (1)..(9): Table A2; Target 5217; NY-ESO1; ENSG00000184033; HLA-A*02:01;
FATPMEAEL

SEQ ID NO: 108060 - protein, 9 aa, Homo sapiens
  misc_feature (1)..(9): Table A2; Target 5218; NY-ESO1; ENSG00000184033; HLA-A*23:01;
FATPMEAEL

SEQ ID NO: 108061 - protein, 9 aa, Homo sapiens
  misc_feature (1)..(9): Table A2; Target 5219; NY-ESO1; ENSG00000184033; HLA-A*30:01;
FATPMEAEL

SEQ ID NO: 108062 - protein, 9 aa, Homo sapiens
  misc_feature (1)..(9): Table A2; Target 5220; NY-ESO1; ENSG00000184033; HLA-A*32:01;
FATPMEAEL

SEQ ID NO: 108063 - protein, 9 aa, Homo sapiens
  misc_feature (1)..(9): Table A2; Target 5221; NY-ESO1; ENSG00000184033; HLA-A*68:02;
FATPMEAEL

SEQ ID NO: 108064 - protein, 9 aa, Homo sapiens
  misc_feature (1)..(9): Table A2; Target 5222; NY-ESO1; ENSG00000184033; HLA-B*13:02;
FATPMEAEL

SEQ ID NO: 108065 - protein, 9 aa, Homo sapiens
  misc_feature (1)..(9): Table A2; Target 5223; NY-ESO1; ENSG00000184033; HLA-B*15:03;
FATPMEAEL

SEQ ID NO: 108066 - protein, 9 aa, Homo sapiens
  misc_feature (1)..(9): Table A2; Target 5224; NY-ESO1; ENSG00000184033; HLA-B*27:05;
FATPMEAEL

SEQ ID NO: 108067 - protein, 9 aa, Homo sapiens
  misc_feature (1)..(9): Table A2; Target 5225; NY-ESO1; ENSG00000184033; HLA-B*35:01;
FATPMEAEL

SEQ ID NO: 108068 - protein, 9 aa, Homo sapiens
  misc_feature (1)..(9): Table A2; Target 5226; NY-ESO1; ENSG00000184033; HLA-B*35:03;
FATPMEAEL

SEQ ID NO: 108069 - protein, 9 aa, Homo sapiens
  misc_feature (1)..(9): Table A2; Target 5227; NY-ESO1; ENSG00000184033; HLA-B*38:01;
FATPMEAEL

SEQ ID NO: 108070 - protein, 9 aa, Homo sapiens
  misc_feature (1)..(9): Table A2; Target 5228; NY-ESO1; ENSG00000184033; HLA-B*39:01;
FATPMEAEL

SEQ ID NO: 108071 - protein, 9 aa, Homo sapiens
  misc_feature (1)..(9): Table A2; Target 5229; NY-ESO1; ENSG00000184033; HLA-B*40:01;
FATPMEAEL

SEQ ID NO: 108072 - protein, 9 aa, Homo sapiens
  misc_feature (1)..(9): Table A2; Target 5230; NY-ESO1; ENSG00000184033; HLA-B*46:01;
FATPMEAEL

SEQ ID NO: 108073 - protein, 9 aa, Homo sapiens
  misc_feature (1)..(9): Table A2; Target 5231; NY-ESO1; ENSG00000184033; HLA-B*51:01;
FATPMEAEL

SEQ ID NO: 108074 - protein, 9 aa, Homo sapiens
  misc_feature (1)..(9): Table A2; Target 5232; NY-ESO1; ENSG00000184033; HLA-B*54:01;
FATPMEAEL

SEQ ID NO: 108075 - protein, 9 aa, Homo sapiens
  misc_feature (1)..(9): Table A2; Target 5233; NY-ESO1; ENSG00000184033; HLA-B*55:01;
FATPMEAEL

SEQ ID NO: 108076 - protein, 9 aa, Homo sapiens
  misc_feature (1)..(9): Table A2; Target 5234; NY-ESO1; ENSG00000184033; HLA-B*58:01;
FATPMEAEL

SEQ ID NO: 108077 - protein, 9 aa, Homo sapiens
  misc_feature (1)..(9): Table A2; Target 5235; NY-ESO1; ENSG00000184033; HLA-C*01:02;
FATPMEAEL

SEQ ID NO: 108078 - protein, 9 aa, Homo sapiens
  misc_feature (1)..(9): Table A2; Target 5236; NY-ESO1; ENSG00000184033; HLA-C*02:02;
FATPMEAEL

SEQ ID NO: 108079 - protein, 9 aa, Homo sapiens
  misc_feature (1)..(9): Table A2; Target 5237; NY-ESO1; ENSG00000184033; HLA-C*03:03;
FATPMEAEL

SEQ ID NO: 108080 - protein, 9 aa, Homo sapiens
  misc_feature (1)..(9): Table A2; Target 5238; NY-ESO1; ENSG00000184033; HLA-C*03:04;
FATPMEAEL

SEQ ID NO: 108081 - protein, 9 aa, Homo sapiens
  misc_feature (1)..(9): Table A2; Target 5239; NY-ESO1; ENSG00000184033; HLA-C*04:01;
FATPMEAEL

SEQ ID NO: 108082 - protein, 9 aa, Homo sapiens
  misc_feature (1)..(9): Table A2; Target 5240; NY-ESO1; ENSG00000184033; HLA-C*05:01;
FATPMEAEL

SEQ ID NO: 108083 - protein, 9 aa, Homo sapiens
  misc_feature (1)..(9): Table A2; Target 5241; NY-ESO1; ENSG00000184033; HLA-C*07:04;
FATPMEAEL

SEQ ID NO: 108084 - protein, 9 aa, Homo sapiens
  misc_feature (1)..(9): Table A2; Target 5242; NY-ESO1; ENSG00000184033; HLA-C*07:06;
FATPMEAEL

SEQ ID NO: 108085 - protein, 9 aa, Homo sapiens
  misc_feature (1)..(9): Table A2; Target 5243; NY-ESO1; ENSG00000184033; HLA-C*12:03;
FATPMEAEL

SEQ ID NO: 108086 - protein, 9 aa, Homo sapiens
  misc_feature (1)..(9): Table A2; Target 5244; NY-ESO1; ENSG00000184033; HLA-C*14:02;
FATPMEAEL

SEQ ID NO: 108087 - protein, 9 aa, Homo sapiens
  misc_feature (1)..(9): Table A2; Target 5245; NY-ESO1; ENSG00000184033; HLA-C*16:01;
FATPMEAEL

SEQ ID NO: 108088 - protein, 9 aa, Homo sapiens
  misc_feature (1)..(9): Table A2; Target 5246; NY-ESO1; ENSG00000184033; HLA-C*16:02;
FATPMEAEL

SEQ ID NO: 108089 - protein, 9 aa, Homo sapiens
  misc_feature (1)..(9): Table A2; Target 5247; NY-ESO1; ENSG00000184033; HLA-C*16:04;
FATPMEAEL

SEQ ID NO: 108090 - protein, 11 aa, Homo sapiens
  misc_feature (1)..(11): Table A2; Target 5248; NY-ESO1; ENSG00000184033; HLA-A*01:01;
FLAQPPSGQRR

SEQ ID NO: 108091 - protein, 11 aa, Homo sapiens
  misc_feature (1)..(11): Table A2; Target 5249; NY-ESO1; ENSG00000184033; HLA-A*02:03;
FLAQPPSGQRR

SEQ ID NO: 108092 - protein, 11 aa, Homo sapiens
  misc_feature (1)..(11): Table A2; Target 5250; NY-ESO1; ENSG00000184033; HLA-A*02:04;
FLAQPPSGQRR

SEQ ID NO: 108093 - protein, 11 aa, Homo sapiens
  misc_feature (1)..(11): Table A2; Target 5251; NY-ESO1; ENSG00000184033; HLA-A*31:01;
FLAQPPSGQRR

SEQ ID NO: 108094 - protein, 11 aa, Homo sapiens
  misc_feature (1)..(11): Table A2; Target 5252; NY-ESO1; ENSG00000184033; HLA-A*33:01;
FLAQPPSGQRR

SEQ ID NO: 108095 - protein, 11 aa, Homo sapiens
  misc_feature (1)..(11): Table A2; Target 5253; NY-ESO1; ENSG00000184033; HLA-A*33:03;
FLAQPPSGQRR

SEQ ID NO: 108096 - protein, 11 aa, Homo sapiens
  misc_feature (1)..(11): Table A2; Target 5254; NY-ESO1; ENSG00000184033; HLA-A*68:01;
FLAQPPSGQRR

SEQ ID NO: 108097 - protein, 11 aa, Homo sapiens
  misc_feature (1)..(11): Table A2; Target 5255; NY-ESO1; ENSG00000184033; HLA-A*68:02;
FLAQPPSGQRR

SEQ ID NO: 108098 - protein, 11 aa, Homo sapiens
  misc_feature (1)..(11): Table A2; Target 5256; NY-ESO1; ENSG00000184033; HLA-B*27:05;
FLAQPPSGQRR

SEQ ID NO: 108099 - protein, 11 aa, Homo sapiens
  misc_feature (1)..(11): Table A2; Target 5257; NY-ESO1; ENSG00000184033; HLA-C*07:02;
FLAQPPSGQRR

SEQ ID NO: 108100 - protein, 10 aa, Homo sapiens
  misc_feature (1)..(10): Table A2; Target 5258; NY-ESO1; ENSG00000184033; HLA-A*68:01;
FLAQPPSGQR

SEQ ID NO: 108101 - protein, 9 aa, Homo sapiens
  misc_feature (1)..(9): Table A2; Target 5259; NY-ESO1; ENSG00000184033; HLA-A*02:03;
FLAQPPSGQ

SEQ ID NO: 108102 - protein, 9 aa, Homo sapiens
  misc_feature (1)..(9): Table A2; Target 5260; NY-ESO1; ENSG00000184033; HLA-A*32:01;
FLAQPPSGQ

SEQ ID NO: 108103 - protein, 9 aa, Homo sapiens
  misc_feature (1)..(9): Table A2; Target 5261; NY-ESO1; ENSG00000184033; HLA-A*02:07;
FLPVFLAQP

SEQ ID NO: 108104 - protein, 11 aa, Homo sapiens
  misc_feature (1)..(11): Table A2; Target 5262; NY-ESO1; ENSG00000184033; HLA-A*33:03;
FTVSGNILTIR

SEQ ID NO: 108105 - protein, 11 aa, Homo sapiens
  misc_feature (1)..(11): Table A2; Target 5263; NY-ESO1; ENSG00000184033; HLA-A*68:01;
FTVSGNILTIR

SEQ ID NO: 108106 - protein, 11 aa, Homo sapiens
  misc_feature (1)..(11): Table A2; Target 5264; NY-ESO1; ENSG00000184033; HLA-A*68:02;
FTVSGNILTIR

SEQ ID NO: 108107 - protein, 10 aa, Homo sapiens
  misc_feature (1)..(10): Table A2; Target 5265; NY-ESO1; ENSG00000184033; HLA-A*02:03;
FTVSGNILTI

SEQ ID NO: 108108 - protein, 10 aa, Homo sapiens
  misc_feature (1)..(10): Table A2; Target 5266; NY-ESO1; ENSG00000184033; HLA-A*23:01;
FTVSGNILTI

SEQ ID NO: 108109 - protein, 10 aa, Homo sapiens
  misc_feature (1)..(10): Table A2; Target 5267; NY-ESO1; ENSG00000184033; HLA-A*25:01;
FTVSGNILTI

SEQ ID NO: 108110 - protein, 10 aa, Homo sapiens
  misc_feature (1)..(10): Table A2; Target 5268; NY-ESO1; ENSG00000184033; HLA-A*26:01;
FTVSGNILTI

SEQ ID NO: 108111 - protein, 10 aa, Homo sapiens
  misc_feature (1)..(10): Table A2; Target 5269; NY-ESO1; ENSG00000184033; HLA-A*68:02;
FTVSGNILTI

SEQ ID NO: 108112 - protein, 10 aa, Homo sapiens
  misc_feature (1)..(10): Table A2; Target 5270; NY-ESO1; ENSG00000184033; HLA-C*02:02;
FTVSGNILTI

SEQ ID NO: 108113 - protein, 8 aa, Homo sapiens
  misc_feature (1)..(8): Table A2; Target 5271; NY-ESO1; ENSG00000184033; HLA-B*39:01;
FTVSGNIL

SEQ ID NO: 108114 - protein, 8 aa, Homo sapiens
  misc_feature (1)..(8): Table A2; Target 5272; NY-ESO1; ENSG00000184033; HLA-B*46:01;
FTVSGNIL

SEQ ID NO: 108115 - protein, 8 aa, Homo sapiens
  misc_feature (1)..(8): Table A2; Target 5273; NY-ESO1; ENSG00000184033; HLA-C*02:02;
FTVSGNIL

SEQ ID NO: 108116 - protein, 8 aa, Homo sapiens
  misc_feature (1)..(8): Table A2; Target 5274; NY-ESO1; ENSG00000184033; HLA-C*03:03;
FTVSGNIL

SEQ ID NO: 108117 - protein, 8 aa, Homo sapiens
  misc_feature (1)..(8): Table A2; Target 5275; NY-ESO1; ENSG00000184033; HLA-C*03:04;
FTVSGNIL

SEQ ID NO: 108118 - protein, 8 aa, Homo sapiens
  misc_feature (1)..(8): Table A2; Target 5276; NY-ESO1; ENSG00000184033; HLA-C*14:02;
FTVSGNIL

SEQ ID NO: 108119 - protein, 9 aa, Homo sapiens
  misc_feature (1)..(9): Table A2; Target 5277; NY-ESO1; ENSG00000184033; HLA-B*07:02;
GARGPESRL

SEQ ID NO: 108120 - protein, 9 aa, Homo sapiens
  misc_feature (1)..(9): Table A2; Target 5278; NY-ESO1; ENSG00000184033; HLA-C*07:02;
GARGPESRL

SEQ ID NO: 108121 - protein, 8 aa, Homo sapiens
  misc_feature (1)..(8): Table A2; Target 5279; NY-ESO1; ENSG00000184033; HLA-C*16:02;
GATGGRGP

SEQ ID NO: 108122 - protein, 11 aa, Homo sapiens
  misc_feature (1)..(11): Table A2; Target 5280; NY-ESO1; ENSG00000184033; HLA-C*06:02;
GEAGATGGRGP

SEQ ID NO: 108123 - protein, 11 aa, Homo sapiens
  misc_feature (1)..(11): Table A2; Target 5281; NY-ESO1; ENSG00000184033; HLA-C*16:04;
GEAGATGGRGP

SEQ ID NO: 108124 - protein, 9 aa, Homo sapiens
  misc_feature (1)..(9): Table A2; Target 5282; NY-ESO1; ENSG00000184033; HLA-B*07:02;
GPESRLLEF

SEQ ID NO: 108125 - protein, 9 aa, Homo sapiens
  misc_feature (1)..(9): Table A2; Target 5283; NY-ESO1; ENSG00000184033; HLA-B*08:01;
GPESRLLEF

SEQ ID NO: 108126 - protein, 9 aa, Homo sapiens
  misc_feature (1)..(9): Table A2; Target 5284; NY-ESO1; ENSG00000184033; HLA-B*35:01;
GPESRLLEF

SEQ ID NO: 108127 - protein, 9 aa, Homo sapiens
  misc_feature (1)..(9): Table A2; Target 5285; NY-ESO1; ENSG00000184033; HLA-B*55:01;
GPESRLLEF

SEQ ID NO: 108128 - protein, 9 aa, Homo sapiens
  misc_feature (1)..(9): Table A2; Target 5286; NY-ESO1; ENSG00000184033; HLA-C*07:02;
GPESRLLEF

SEQ ID NO: 108129 - protein, 10 aa, Homo sapiens
  misc_feature (1)..(10): Table A2; Target 5287; NY-ESO1; ENSG00000184033; HLA-C*07:02;
GPGGGAPRGP

SEQ ID NO: 108130 - protein, 10 aa, Homo sapiens
  misc_feature (1)..(10): Table A2; Target 5288; NY-ESO1; ENSG00000184033; HLA-B*07:02;
GPHGGAASGL

SEQ ID NO: 108131 - protein, 10 aa, Homo sapiens
  misc_feature (1)..(10): Table A2; Target 5289; NY-ESO1; ENSG00000184033; HLA-C*07:02;
GPHGGAASGL

SEQ ID NO: 108132 - protein, 11 aa, Homo sapiens
  misc_feature (1)..(11): Table A2; Target 5290; NY-ESO1; ENSG00000184033; HLA-B*07:02;
GPRGAGAARAS

SEQ ID NO: 108133 - protein, 10 aa, Homo sapiens
  misc_feature (1)..(10): Table A2; Target 5291; NY-ESO1; ENSG00000184033; HLA-B*07:02;
GPRGAGAARA

SEQ ID NO: 108134 - protein, 10 aa, Homo sapiens
  misc_feature (1)..(10): Table A2; Target 5292; NY-ESO1; ENSG00000184033; HLA-B*56:01;
GPRGAGAARA

SEQ ID NO: 108135 - protein, 10 aa, Homo sapiens
  misc_feature (1)..(10): Table A2; Target 5293; NY-ESO1; ENSG00000184033; HLA-C*07:02;
GPRGAGAARA

SEQ ID NO: 108136 - protein, 9 aa, Homo sapiens
  misc_feature (1)..(9): Table A2; Target 5294; NY-ESO1; ENSG00000184033; HLA-A*33:03;
GPRGAGAAR

SEQ ID NO: 108137 - protein, 9 aa, Homo sapiens
  misc_feature (1)..(9): Table A2; Target 5295; NY-ESO1; ENSG00000184033; HLA-B*07:02;
GPRGAGAAR

SEQ ID NO: 108138 - protein, 9 aa, Homo sapiens
  misc_feature (1)..(9): Table A2; Target 5296; NY-ESO1; ENSG00000184033; HLA-C*07:02;
GPRGAGAAR

SEQ ID NO: 108139 - protein, 11 aa, Homo sapiens
  misc_feature (1)..(11): Table A2; Target 5297; NY-ESO1; ENSG00000184033; HLA-B*27:05;
GRGPRGAGAAR

SEQ ID NO: 108140 - protein, 9 aa, Homo sapiens
  misc_feature (1)..(9): Table A2; Target 5298; NY-ESO1; ENSG00000184033; HLA-A*02:01;
GVLLKEFTV

SEQ ID NO: 108141 - protein, 9 aa, Homo sapiens
  misc_feature (1)..(9): Table A2; Target 5299; NY-ESO1; ENSG00000184033; HLA-A*02:04;
GVLLKEFTV

SEQ ID NO: 108142 - protein, 9 aa, Homo sapiens
  misc_feature (1)..(9): Table A2; Target 5300; NY-ESO1; ENSG00000184033; HLA-B*13:02;
GVLLKEFTV

SEQ ID NO: 108143 - protein, 8 aa, Homo sapiens
  misc_feature (1)..(8): Table A2; Target 5301; NY-ESO1; ENSG00000184033; HLA-C*07:04;
HGGAASGL

SEQ ID NO: 108144 - protein, 9 aa, Homo sapiens
  misc_feature (1)..(9): Table A2; Target 5302; NY-ESO1; ENSG00000184033; HLA-A*02:01;
ILTIRLTAA

SEQ ID NO: 108145 - protein, 9 aa, Homo sapiens
  misc_feature (1)..(9): Table A2; Target 5303; NY-ESO1; ENSG00000184033; HLA-A*02:03;
ILTIRLTAA

SEQ ID NO: 108146 - protein, 9 aa, Homo sapiens
  misc_feature (1)..(9): Table A2; Target 5304; NY-ESO1; ENSG00000184033; HLA-A*02:04;
ILTIRLTAA

SEQ ID NO: 108147 - protein, 9 aa, Homo sapiens
  misc_feature (1)..(9): Table A2; Target 5305; NY-ESO1; ENSG00000184033; HLA-B*08:01;
ILTIRLTAA

SEQ ID NO: 108148 - protein, 9 aa, Homo sapiens
  misc_feature (1)..(9): Table A2; Target 5306; NY-ESO1; ENSG00000184033; HLA-B*55:01;
ILTIRLTAA

SEQ ID NO: 108149 - protein, 9 aa, Homo sapiens
  misc_feature (1)..(9): Table A2; Target 5307; NY-ESO1; ENSG00000184033; HLA-B*07:02;
IPDGPGGNA

SEQ ID NO: 108150 - protein, 9 aa, Homo sapiens
  misc_feature (1)..(9): Table A2; Target 5308; NY-ESO1; ENSG00000184033; HLA-B*55:01;
IPDGPGGNA

SEQ ID NO: 108151 - protein, 9 aa, Homo sapiens
  misc_feature (1)..(9): Table A2; Target 5309; NY-ESO1; ENSG00000184033; HLA-B*56:01;
IPDGPGGNA

SEQ ID NO: 108152 - protein, 9 aa, Homo sapiens
  misc_feature (1)..(9): Table A2; Target 5310; NY-ESO1; ENSG00000184033; HLA-C*05:01;
IPDGPGGNA

SEQ ID NO: 108153 - protein, 10 aa, Homo sapiens
  misc_feature (1)..(10): Table A2; Target 5311; NY-ESO1; ENSG00000184033; HLA-A*30:01;
KEFTVSGNIL

SEQ ID NO: 108154 - protein, 10 aa, Homo sapiens
  misc_feature (1)..(10): Table A2; Target 5312; NY-ESO1; ENSG00000184033; HLA-B*27:05;
KEFTVSGNIL

SEQ ID NO: 108155 - protein, 10 aa, Homo sapiens
  misc_feature (1)..(10): Table A2; Target 5313; NY-ESO1; ENSG00000184033; HLA-B*37:01;
KEFTVSGNIL

SEQ ID NO: 108156 - protein, 10 aa, Homo sapiens
  misc_feature (1)..(10): Table A2; Target 5314; NY-ESO1; ENSG00000184033; HLA-B*40:01;
KEFTVSGNIL

SEQ ID NO: 108157 - protein, 10 aa, Homo sapiens
  misc_feature (1)..(10): Table A2; Target 5315; NY-ESO1; ENSG00000184033; HLA-B*40:02;
KEFTVSGNIL

SEQ ID NO: 108158 - protein, 10 aa, Homo sapiens
  misc_feature (1)..(10): Table A2; Target 5316; NY-ESO1; ENSG00000184033; HLA-B*44:02;
KEFTVSGNIL

SEQ ID NO: 108159 - protein, 10 aa, Homo sapiens
  misc_feature (1)..(10): Table A2; Target 5317; NY-ESO1; ENSG00000184033; HLA-B*44:03;
KEFTVSGNIL

SEQ ID NO: 108160 - protein, 10 aa, Homo sapiens
  misc_feature (1)..(10): Table A2; Target 5318; NY-ESO1; ENSG00000184033; HLA-B*49:01;
KEFTVSGNIL

SEQ ID NO: 108161 - protein, 10 aa, Homo sapiens
  misc_feature (1)..(10): Table A2; Target 5319; NY-ESO1; ENSG00000184033; HLA-C*12:03;
KEFTVSGNIL

SEQ ID NO: 108162 - protein, 10 aa, Homo sapiens
  misc_feature (1)..(10): Table A2; Target 5320; NY-ESO1; ENSG00000184033; HLA-C*16:04;
KEFTVSGNIL

SEQ ID NO: 108163 - protein, 9 aa, Homo sapiens
  misc_feature (1)..(9): Table A2; Target 5321; NY-ESO1; ENSG00000184033; HLA-A*30:01;
KEFTVSGNI

SEQ ID NO: 108164 - protein, 9 aa, Homo sapiens
  misc_feature (1)..(9): Table A2; Target 5322; NY-ESO1; ENSG00000184033; HLA-B*13:02;
KEFTVSGNI

SEQ ID NO: 108165 - protein, 9 aa, Homo sapiens
  misc_feature (1)..(9): Table A2; Target 5323; NY-ESO1; ENSG00000184033; HLA-B*37:01;
KEFTVSGNI

SEQ ID NO: 108166 - protein, 9 aa, Homo sapiens
  misc_feature (1)..(9): Table A2; Target 5324; NY-ESO1; ENSG00000184033; HLA-B*40:01;
KEFTVSGNI

SEQ ID NO: 108167 - protein, 9 aa, Homo sapiens
  misc_feature (1)..(9): Table A2; Target 5325; NY-ESO1; ENSG00000184033; HLA-B*40:02;
KEFTVSGNI

SEQ ID NO: 108168 - protein, 9 aa, Homo sapiens
  misc_feature (1)..(9): Table A2; Target 5326; NY-ESO1; ENSG00000184033; HLA-B*44:02;
KEFTVSGNI

SEQ ID NO: 108169 - protein, 9 aa, Homo sapiens
  misc_feature (1)..(9): Table A2; Target 5327; NY-ESO1; ENSG00000184033; HLA-B*44:03;
KEFTVSGNI

SEQ ID NO: 108170 - protein, 9 aa, Homo sapiens
  misc_feature (1)..(9): Table A2; Target 5328; NY-ESO1; ENSG00000184033; HLA-B*49:01;
KEFTVSGNI

SEQ ID NO: 108171 - protein, 9 aa, Homo sapiens
  misc_feature (1)..(9): Table A2; Target 5329; NY-ESO1; ENSG00000184033; HLA-C*16:04;
KEFTVSGNI

SEQ ID NO: 108172 - protein, 11 aa, Homo sapiens
  misc_feature (1)..(11): Table A2; Target 5330; NY-ESO1; ENSG00000184033; HLA-B*54:01;
LAMPFATPMEA

SEQ ID NO: 108173 - protein, 9 aa, Homo sapiens
  misc_feature (1)..(9): Table A2; Target 5331; NY-ESO1; ENSG00000184033; HLA-A*11:01;
LAMPFATPM

SEQ ID NO: 108174 - protein, 9 aa, Homo sapiens
  misc_feature (1)..(9): Table A2; Target 5332; NY-ESO1; ENSG00000184033; HLA-A*23:01;
LAMPFATPM

SEQ ID NO: 108175 - protein, 9 aa, Homo sapiens
  misc_feature (1)..(9): Table A2; Target 5333; NY-ESO1; ENSG00000184033; HLA-A*24:02;
LAMPFATPM

SEQ ID NO: 108176 - protein, 9 aa, Homo sapiens
  misc_feature (1)..(9): Table A2; Target 5334; NY-ESO1; ENSG00000184033; HLA-A*26:01;
LAMPFATPM

SEQ ID NO: 108177 - protein, 9 aa, Homo sapiens
  misc_feature (1)..(9): Table A2; Target 5335; NY-ESO1; ENSG00000184033; HLA-B*07:02;
LAMPFATPM

SEQ ID NO: 108178 - protein, 9 aa, Homo sapiens
  misc_feature (1)..(9): Table A2; Target 5336; NY-ESO1; ENSG00000184033; HLA-B*08:01;
LAMPFATPM

SEQ ID NO: 108179 - protein, 9 aa, Homo sapiens
  misc_feature (1)..(9): Table A2; Target 5337; NY-ESO1; ENSG00000184033; HLA-B*15:01;
LAMPFATPM

SEQ ID NO: 108180 - protein, 9 aa, Homo sapiens
  misc_feature (1)..(9): Table A2; Target 5338; NY-ESO1; ENSG00000184033; HLA-B*15:03;
LAMPFATPM

SEQ ID NO: 108181 - protein, 9 aa, Homo sapiens
  misc_feature (1)..(9): Table A2; Target 5339; NY-ESO1; ENSG00000184033; HLA-B*18:01;
LAMPFATPM

SEQ ID NO: 108182 - protein, 9 aa, Homo sapiens
  misc_feature (1)..(9): Table A2; Target 5340; NY-ESO1; ENSG00000184033; HLA-B*35:01;
LAMPFATPM

SEQ ID NO: 108183 - protein, 9 aa, Homo sapiens
  misc_feature (1)..(9): Table A2; Target 5341; NY-ESO1; ENSG00000184033; HLA-B*35:03;
LAMPFATPM

SEQ ID NO: 108184 - protein, 9 aa, Homo sapiens
  misc_feature (1)..(9): Table A2; Target 5342; NY-ESO1; ENSG00000184033; HLA-B*37:01;
LAMPFATPM

SEQ ID NO: 108185 - protein, 9 aa, Homo sapiens
  misc_feature (1)..(9): Table A2; Target 5343; NY-ESO1; ENSG00000184033; HLA-B*39:01;
LAMPFATPM

SEQ ID NO: 108186 - protein, 9 aa, Homo sapiens
  misc_feature (1)..(9): Table A2; Target 5344; NY-ESO1; ENSG00000184033; HLA-B*40:02;
LAMPFATPM

SEQ ID NO: 108187 - protein, 9 aa, Homo sapiens
  misc_feature (1)..(9): Table A2; Target 5345; NY-ESO1; ENSG00000184033; HLA-B*46:01;
LAMPFATPM

SEQ ID NO: 108188 - protein, 9 aa, Homo sapiens
  misc_feature (1)..(9): Table A2; Target 5346; NY-ESO1; ENSG00000184033; HLA-B*51:01;
LAMPFATPM

SEQ ID NO: 108189 - protein, 9 aa, Homo sapiens
  misc_feature (1)..(9): Table A2; Target 5347; NY-ESO1; ENSG00000184033; HLA-B*54:01;
LAMPFATPM

SEQ ID NO: 108190 - protein, 9 aa, Homo sapiens
  misc_feature (1)..(9): Table A2; Target 5348; NY-ESO1; ENSG00000184033; HLA-B*56:01;
LAMPFATPM

SEQ ID NO: 108191 - protein, 9 aa, Homo sapiens
  misc_feature (1)..(9): Table A2; Target 5349; NY-ESO1; ENSG00000184033; HLA-B*57:01;
LAMPFATPM

SEQ ID NO: 108192 - protein, 9 aa, Homo sapiens
  misc_feature (1)..(9): Table A2; Target 5350; NY-ESO1; ENSG00000184033; HLA-B*58:01;
LAMPFATPM

SEQ ID NO: 108193 - protein, 9 aa, Homo sapiens
  misc_feature (1)..(9): Table A2; Target 5351; NY-ESO1; ENSG00000184033; HLA-C*01:02;
LAMPFATPM

SEQ ID NO: 108194 - protein, 9 aa, Homo sapiens
  misc_feature (1)..(9): Table A2; Target 5352; NY-ESO1; ENSG00000184033; HLA-C*02:02;
LAMPFATPM

SEQ ID NO: 108195 - protein, 9 aa, Homo sapiens
  misc_feature (1)..(9): Table A2; Target 5353; NY-ESO1; ENSG00000184033; HLA-C*03:03;
LAMPFATPM

SEQ ID NO: 108196 - protein, 9 aa, Homo sapiens
  misc_feature (1)..(9): Table A2; Target 5354; NY-ESO1; ENSG00000184033; HLA-C*03:04;
LAMPFATPM

SEQ ID NO: 108197 - protein, 9 aa, Homo sapiens
  misc_feature (1)..(9): Table A2; Target 5355; NY-ESO1; ENSG00000184033; HLA-C*04:01;
LAMPFATPM

SEQ ID NO: 108198 - protein, 9 aa, Homo sapiens
  misc_feature (1)..(9): Table A2; Target 5356; NY-ESO1; ENSG00000184033; HLA-C*05:01;
LAMPFATPM

SEQ ID NO: 108199 - protein, 9 aa, Homo sapiens
  misc_feature (1)..(9): Table A2; Target 5357; NY-ESO1; ENSG00000184033; HLA-C*06:02;
LAMPFATPM

SEQ ID NO: 108200 - protein, 9 aa, Homo sapiens
  misc_feature (1)..(9): Table A2; Target 5358; NY-ESO1; ENSG00000184033; HLA-C*07:01;
LAMPFATPM

SEQ ID NO: 108201 - protein, 9 aa, Homo sapiens
  misc_feature (1)..(9): Table A2; Target 5359; NY-ESO1; ENSG00000184033; HLA-C*07:04;
LAMPFATPM

SEQ ID NO: 108202 - protein, 9 aa, Homo sapiens
  misc_feature (1)..(9): Table A2; Target 5360; NY-ESO1; ENSG00000184033; HLA-C*07:06;
LAMPFATPM

SEQ ID NO: 108203 - protein, 9 aa, Homo sapiens
  misc_feature (1)..(9): Table A2; Target 5361; NY-ESO1; ENSG00000184033; HLA-C*12:03;
LAMPFATPM

SEQ ID NO: 108204 - protein, 9 aa, Homo sapiens
  misc_feature (1)..(9): Table A2; Target 5362; NY-ESO1; ENSG00000184033; HLA-C*14:02;
LAMPFATPM

SEQ ID NO: 108205 - protein, 9 aa, Homo sapiens
  misc_feature (1)..(9): Table A2; Target 5363; NY-ESO1; ENSG00000184033; HLA-C*16:01;
LAMPFATPM

SEQ ID NO: 108206 - protein, 9 aa, Homo sapiens
  misc_feature (1)..(9): Table A2; Target 5364; NY-ESO1; ENSG00000184033; HLA-C*16:02;
LAMPFATPM

SEQ ID NO: 108207 - protein, 9 aa, Homo sapiens
  misc_feature (1)..(9): Table A2; Target 5365; NY-ESO1; ENSG00000184033; HLA-C*16:04;
LAMPFATPM

SEQ ID NO: 108208 - protein, 10 aa, Homo sapiens
  misc_feature (1)..(10): Table A2; Target 5366; NY-ESO1; ENSG00000184033; HLA-B*56:01;
LAQDAPPLPV

SEQ ID NO: 108209 - protein, 10 aa, Homo sapiens
  misc_feature (1)..(10): Table A2; Target 5367; NY-ESO1; ENSG00000184033; HLA-C*03:03;
LAQDAPPLPV

SEQ ID NO: 108210 - protein, 10 aa, Homo sapiens
  misc_feature (1)..(10): Table A2; Target 5368; NY-ESO1; ENSG00000184033; HLA-C*03:04;
LAQDAPPLPV

SEQ ID NO: 108211 - protein, 10 aa, Homo sapiens
  misc_feature (1)..(10): Table A2; Target 5369; NY-ESO1; ENSG00000184033; HLA-C*16:04;
LAQDAPPLPV

SEQ ID NO: 108212 - protein, 8 aa, Homo sapiens
  misc_feature (1)..(8): Table A2; Target 5370; NY-ESO1; ENSG00000184033; HLA-C*03:03;
LAQDAPPL

SEQ ID NO: 108213 - protein, 8 aa, Homo sapiens
  misc_feature (1)..(8): Table A2; Target 5371; NY-ESO1; ENSG00000184033; HLA-C*03:04;
LAQDAPPL

SEQ ID NO: 108214 - protein, 10 aa, Homo sapiens
  misc_feature (1)..(10): Table A2; Target 5372; NY-ESO1; ENSG00000184033; HLA-A*03:02;
LAQPPSGQRR

SEQ ID NO: 108215 - protein, 10 aa, Homo sapiens
  misc_feature (1)..(10): Table A2; Target 5373; NY-ESO1; ENSG00000184033; HLA-A*11:01;
LAQPPSGQRR

SEQ ID NO: 108216 - protein, 10 aa, Homo sapiens
  misc_feature (1)..(10): Table A2; Target 5374; NY-ESO1; ENSG00000184033; HLA-A*31:01;
LAQPPSGQRR

SEQ ID NO: 108217 - protein, 10 aa, Homo sapiens
  misc_feature (1)..(10): Table A2; Target 5375; NY-ESO1; ENSG00000184033; HLA-A*33:01;
LAQPPSGQRR

SEQ ID NO: 108218 - protein, 10 aa, Homo sapiens
  misc_feature (1)..(10): Table A2; Target 5376; NY-ESO1; ENSG00000184033; HLA-A*33:03;
LAQPPSGQRR

SEQ ID NO: 108219 - protein, 10 aa, Homo sapiens
  misc_feature (1)..(10): Table A2; Target 5377; NY-ESO1; ENSG00000184033; HLA-A*68:01;
LAQPPSGQRR

SEQ ID NO: 108220 - protein, 10 aa, Homo sapiens
  misc_feature (1)..(10): Table A2; Target 5378; NY-ESO1; ENSG00000184033; HLA-B*27:05;
LAQPPSGQRR

SEQ ID NO: 108221 - protein, 10 aa, Homo sapiens
  misc_feature (1)..(10): Table A2; Target 5379; NY-ESO1; ENSG00000184033; HLA-B*57:01;
LAQPPSGQRR

SEQ ID NO: 108222 - protein, 10 aa, Homo sapiens
  misc_feature (1)..(10): Table A2; Target 5380; NY-ESO1; ENSG00000184033; HLA-B*58:01;
LAQPPSGQRR

SEQ ID NO: 108223 - protein, 10 aa, Homo sapiens
  misc_feature (1)..(10): Table A2; Target 5381; NY-ESO1; ENSG00000184033; HLA-C*06:02;
LAQPPSGQRR

SEQ ID NO: 108224 - protein, 10 aa, Homo sapiens
  misc_feature (1)..(10): Table A2; Target 5382; NY-ESO1; ENSG00000184033; HLA-C*07:01;
LAQPPSGQRR

SEQ ID NO: 108225 - protein, 10 aa, Homo sapiens
  misc_feature (1)..(10): Table A2; Target 5383; NY-ESO1; ENSG00000184033; HLA-C*07:02;
LAQPPSGQRR

SEQ ID NO: 108226 - protein, 10 aa, Homo sapiens
  misc_feature (1)..(10): Table A2; Target 5384; NY-ESO1; ENSG00000184033; HLA-C*07:06;
LAQPPSGQRR

SEQ ID NO: 108227 - protein, 10 aa, Homo sapiens
  misc_feature (1)..(10): Table A2; Target 5385; NY-ESO1; ENSG00000184033; HLA-C*16:02;
LAQPPSGQRR

SEQ ID NO: 108228 - protein, 9 aa, Homo sapiens
  misc_feature (1)..(9): Table A2; Target 5386; NY-ESO1; ENSG00000184033; HLA-A*03:02;
LAQPPSGQR

SEQ ID NO: 108229 - protein, 9 aa, Homo sapiens
  misc_feature (1)..(9): Table A2; Target 5387; NY-ESO1; ENSG00000184033; HLA-A*11:01;
LAQPPSGQR

SEQ ID NO: 108230 - protein, 9 aa, Homo sapiens
  misc_feature (1)..(9): Table A2; Target 5388; NY-ESO1; ENSG00000184033; HLA-A*31:01;
LAQPPSGQR

SEQ ID NO: 108231 - protein, 9 aa, Homo sapiens
  misc_feature (1)..(9): Table A2; Target 5389; NY-ESO1; ENSG00000184033; HLA-A*33:01;
LAQPPSGQR

SEQ ID NO: 108232 - protein, 9 aa, Homo sapiens
  misc_feature (1)..(9): Table A2; Target 5390; NY-ESO1; ENSG00000184033; HLA-A*33:03;
LAQPPSGQR

SEQ ID NO: 108233 - protein, 9 aa, Homo sapiens
  misc_feature (1)..(9): Table A2; Target 5391; NY-ESO1; ENSG00000184033; HLA-A*68:01;
LAQPPSGQR

SEQ ID NO: 108234 - protein, 9 aa, Homo sapiens
  misc_feature (1)..(9): Table A2; Target 5392; NY-ESO1; ENSG00000184033; HLA-B*27:05;
LAQPPSGQR

SEQ ID NO: 108235 - protein, 9 aa, Homo sapiens
  misc_feature (1)..(9): Table A2; Target 5393; NY-ESO1; ENSG00000184033; HLA-C*07:06;
LAQPPSGQR

SEQ ID NO: 108236 - protein, 9 aa, Homo sapiens
  misc_feature (1)..(9): Table A2; Target 5394; NY-ESO1; ENSG00000184033; HLA-C*16:02;
LAQPPSGQR

SEQ ID NO: 108237 - protein, 11 aa, Homo sapiens
  misc_feature (1)..(11): Table A2; Target 5395; NY-ESO1; ENSG00000184033; HLA-B*54:01;
LPVFLAQPPSG

SEQ ID NO: 108238 - protein, 10 aa, Homo sapiens
  misc_feature (1)..(10): Table A2; Target 5396; NY-ESO1; ENSG00000184033; HLA-B*54:01;
LPVFLAQPPS

SEQ ID NO: 108239 - protein, 9 aa, Homo sapiens
  misc_feature (1)..(9): Table A2; Target 5397; NY-ESO1; ENSG00000184033; HLA-B*54:01;
LPVFLAQPP

SEQ ID NO: 108240 - protein, 11 aa, Homo sapiens
  misc_feature (1)..(11): Table A2; Target 5398; NY-ESO1; ENSG00000184033; HLA-B*35:01;
LPVPGVLLKEF

SEQ ID NO: 108241 - protein, 9 aa, Homo sapiens
  misc_feature (1)..(9): Table A2; Target 5399; NY-ESO1; ENSG00000184033; HLA-B*51:01;
LPVPGVLLK

SEQ ID NO: 108242 - protein, 8 aa, Homo sapiens
  misc_feature (1)..(8): Table A2; Target 5400; NY-ESO1; ENSG00000184033; HLA-B*35:01;
LPVPGVLL

SEQ ID NO: 108243 - protein, 8 aa, Homo sapiens
  misc_feature (1)..(8): Table A2; Target 5401; NY-ESO1; ENSG00000184033; HLA-B*35:03;
LPVPGVLL

SEQ ID NO: 108244 - protein, 8 aa, Homo sapiens
  misc_feature (1)..(8): Table A2; Target 5402; NY-ESO1; ENSG00000184033; HLA-B*51:01;
LPVPGVLL

SEQ ID NO: 108245 - protein, 8 aa, Homo sapiens
  misc_feature (1)..(8): Table A2; Target 5403; NY-ESO1; ENSG00000184033; HLA-B*56:01;
LPVPGVLL

SEQ ID NO: 108246 - protein, 9 aa, Homo sapiens
  misc_feature (1)..(9): Table A2; Target 5404; NY-ESO1; ENSG00000184033; HLA-B*27:05;
LQLSISSCL

SEQ ID NO: 108247 - protein, 9 aa, Homo sapiens
  misc_feature (1)..(9): Table A2; Target 5405; NY-ESO1; ENSG00000184033; HLA-C*03:04;
LTAADHRQL

SEQ ID NO: 108248 - protein, 9 aa, Homo sapiens
  misc_feature (1)..(9): Table A2; Target 5406; NY-ESO1; ENSG00000184033; HLA-C*06:02;
LTAADHRQL

SEQ ID NO: 108249 - protein, 9 aa, Homo sapiens
  misc_feature (1)..(9): Table A2; Target 5407; NY-ESO1; ENSG00000184033; HLA-C*12:03;
LTAADHRQL

SEQ ID NO: 108250 - protein, 9 aa, Homo sapiens
  misc_feature (1)..(9): Table A2; Target 5408; NY-ESO1; ENSG00000184033; HLA-C*16:01;
LTAADHRQL

SEQ ID NO: 108251 - protein, 9 aa, Homo sapiens
  misc_feature (1)..(9): Table A2; Target 5409; NY-ESO1; ENSG00000184033; HLA-C*16:02;
LTAADHRQL

SEQ ID NO: 108252 - protein, 10 aa, Homo sapiens
  misc_feature (1)..(10): Table A2; Target 5410; NY-ESO1; ENSG00000184033; HLA-A*30:01;
MEAELARRSL

SEQ ID NO: 108253 - protein, 10 aa, Homo sapiens
  misc_feature (1)..(10): Table A2; Target 5411; NY-ESO1; ENSG00000184033; HLA-B*40:02;
MEAELARRSL

SEQ ID NO: 108254 - protein, 10 aa, Homo sapiens
  misc_feature (1)..(10): Table A2; Target 5412; NY-ESO1; ENSG00000184033; HLA-B*44:02;
MEAELARRSL

SEQ ID NO: 108255 - protein, 10 aa, Homo sapiens
  misc_feature (1)..(10): Table A2; Target 5413; NY-ESO1; ENSG00000184033; HLA-B*44:03;
MEAELARRSL

SEQ ID NO: 108256 - protein, 11 aa, Homo sapiens
  misc_feature (1)..(11): Table A2; Target 5414; NY-ESO1; ENSG00000184033; HLA-A*68:02;
MPFATPMEAEL

SEQ ID NO: 108257 - protein, 11 aa, Homo sapiens
  misc_feature (1)..(11): Table A2; Target 5415; NY-ESO1; ENSG00000184033; HLA-B*07:02;
MPFATPMEAEL

SEQ ID NO: 108258 - protein, 11 aa, Homo sapiens
  misc_feature (1)..(11): Table A2; Target 5416; NY-ESO1; ENSG00000184033; HLA-B*35:01;
MPFATPMEAEL

SEQ ID NO: 108259 - protein, 11 aa, Homo sapiens
  misc_feature (1)..(11): Table A2; Target 5417; NY-ESO1; ENSG00000184033; HLA-B*35:03;
MPFATPMEAEL

SEQ ID NO: 108260 - protein, 11 aa, Homo sapiens
  misc_feature (1)..(11): Table A2; Target 5418; NY-ESO1; ENSG00000184033; HLA-B*51:01;
MPFATPMEAEL

SEQ ID NO: 108261 - protein, 11 aa, Homo sapiens
  misc_feature (1)..(11): Table A2; Target 5419; NY-ESO1; ENSG00000184033; HLA-B*54:01;
MPFATPMEAEL

SEQ ID NO: 108262 - protein, 11 aa, Homo sapiens
  misc_feature (1)..(11): Table A2; Target 5420; NY-ESO1; ENSG00000184033; HLA-B*55:01;
MPFATPMEAEL

SEQ ID NO: 108263 - protein, 11 aa, Homo sapiens
  misc_feature (1)..(11): Table A2; Target 5421; NY-ESO1; ENSG00000184033; HLA-B*56:01;
MPFATPMEAEL

SEQ ID NO: 108264 - protein, 11 aa, Homo sapiens
  misc_feature (1)..(11): Table A2; Target 5422; NY-ESO1; ENSG00000184033; HLA-C*03:03;
MPFATPMEAEL

SEQ ID NO: 108265 - protein, 11 aa, Homo sapiens
  misc_feature (1)..(11): Table A2; Target 5423; NY-ESO1; ENSG00000184033; HLA-C*04:01;
MPFATPMEAEL

SEQ ID NO: 108266 - protein, 11 aa, Homo sapiens
  misc_feature (1)..(11): Table A2; Target 5424; NY-ESO1; ENSG00000184033; HLA-C*07:01;
MPFATPMEAEL

SEQ ID NO: 108267 - protein, 11 aa, Homo sapiens
  misc_feature (1)..(11): Table A2; Target 5425; NY-ESO1; ENSG00000184033; HLA-C*07:06;
MPFATPMEAEL

SEQ ID NO: 108268 - protein, 9 aa, Homo sapiens
  misc_feature (1)..(9): Table A2; Target 5426; NY-ESO1; ENSG00000184033; HLA-A*02:01;
MPFATPMEA

SEQ ID NO: 108269 - protein, 9 aa, Homo sapiens
  misc_feature (1)..(9): Table A2; Target 5427; NY-ESO1; ENSG00000184033; HLA-A*02:03;
MPFATPMEA

SEQ ID NO: 108270 - protein, 9 aa, Homo sapiens
  misc_feature (1)..(9): Table A2; Target 5428; NY-ESO1; ENSG00000184033; HLA-B*07:02;
MPFATPMEA

SEQ ID NO: 108271 - protein, 9 aa, Homo sapiens
  misc_feature (1)..(9): Table A2; Target 5429; NY-ESO1; ENSG00000184033; HLA-B*08:01;
MPFATPMEA

SEQ ID NO: 108272 - protein, 9 aa, Homo sapiens
  misc_feature (1)..(9): Table A2; Target 5430; NY-ESO1; ENSG00000184033; HLA-B*35:01;
MPFATPMEA

SEQ ID NO: 108273 - protein, 9 aa, Homo sapiens
  misc_feature (1)..(9): Table A2; Target 5431; NY-ESO1; ENSG00000184033; HLA-B*35:03;
MPFATPMEA

SEQ ID NO: 108274 - protein, 9 aa, Homo sapiens
  misc_feature (1)..(9): Table A2; Target 5432; NY-ESO1; ENSG00000184033; HLA-B*51:01;
MPFATPMEA

SEQ ID NO: 108275 - protein, 9 aa, Homo sapiens
  misc_feature (1)..(9): Table A2; Target 5433; NY-ESO1; ENSG00000184033; HLA-B*54:01;
MPFATPMEA

SEQ ID NO: 108276 - protein, 9 aa, Homo sapiens
  misc_feature (1)..(9): Table A2; Target 5434; NY-ESO1; ENSG00000184033; HLA-B*55:01;
MPFATPMEA

SEQ ID NO: 108277 - protein, 9 aa, Homo sapiens
  misc_feature (1)..(9): Table A2; Target 5435; NY-ESO1; ENSG00000184033; HLA-B*56:01;
MPFATPMEA

SEQ ID NO: 108278 - protein, 9 aa, Homo sapiens
  misc_feature (1)..(9): Table A2; Target 5436; NY-ESO1; ENSG00000184033; HLA-C*02:02;
MPFATPMEA

SEQ ID NO: 108279 - protein, 9 aa, Homo sapiens
  misc_feature (1)..(9): Table A2; Target 5437; NY-ESO1; ENSG00000184033; HLA-C*03:03;
MPFATPMEA

SEQ ID NO: 108280 - protein, 9 aa, Homo sapiens
  misc_feature (1)..(9): Table A2; Target 5438; NY-ESO1; ENSG00000184033; HLA-C*04:01;
MPFATPMEA

SEQ ID NO: 108281 - protein, 9 aa, Homo sapiens
  misc_feature (1)..(9): Table A2; Target 5439; NY-ESO1; ENSG00000184033; HLA-C*06:02;
MPFATPMEA

SEQ ID NO: 108282 - protein, 9 aa, Homo sapiens
  misc_feature (1)..(9): Table A2; Target 5440; NY-ESO1; ENSG00000184033; HLA-C*07:02;
MPFATPMEA

SEQ ID NO: 108283 - protein, 9 aa, Homo sapiens
  misc_feature (1)..(9): Table A2; Target 5441; NY-ESO1; ENSG00000184033; HLA-C*12:03;
MPFATPMEA

SEQ ID NO: 108284 - protein, 9 aa, Homo sapiens
  misc_feature (1)..(9): Table A2; Target 5442; NY-ESO1; ENSG00000184033; HLA-C*14:02;
MPFATPMEA

SEQ ID NO: 108285 - protein, 9 aa, Homo sapiens
  misc_feature (1)..(9): Table A2; Target 5443; NY-ESO1; ENSG00000184033; HLA-C*16:04;
MPFATPMEA

SEQ ID NO: 108286 - protein, 8 aa, Homo sapiens
  misc_feature (1)..(8): Table A2; Target 5444; NY-ESO1; ENSG00000184033; HLA-B*54:01;
MPFATPME

SEQ ID NO: 108287 - protein, 10 aa, Homo sapiens
  misc_feature (1)..(10): Table A2; Target 5445; NY-ESO1; ENSG00000184033; HLA-A*02:03;
NILTIRLTAA

SEQ ID NO: 108288 - protein, 9 aa, Homo sapiens
  misc_feature (1)..(9): Table A2; Target 5446; NY-ESO1; ENSG00000184033; HLA-B*54:01;
NILTIRLTA

SEQ ID NO: 108289 - protein, 9 aa, Homo sapiens
  misc_feature (1)..(9): Table A2; Target 5447; NY-ESO1; ENSG00000184033; HLA-C*16:01;
NILTIRLTA

SEQ ID NO: 108290 - protein, 10 aa, Homo sapiens
  misc_feature (1)..(10): Table A2; Target 5448; NY-ESO1; ENSG00000184033; HLA-C*07:02;
PFATPMEAEL

SEQ ID NO: 108291 - protein, 9 aa, Homo sapiens
  misc_feature (1)..(9): Table A2; Target 5449; NY-ESO1; ENSG00000184033; HLA-C*07:02;
PGGGAPRGP

SEQ ID NO: 108292 - protein, 9 aa, Homo sapiens
  misc_feature (1)..(9): Table A2; Target 5450; NY-ESO1; ENSG00000184033; HLA-A*24:02;
PLPVPGVLL

SEQ ID NO: 108293 - protein, 9 aa, Homo sapiens
  misc_feature (1)..(9): Table A2; Target 5451; NY-ESO1; ENSG00000184033; HLA-B*07:02;
PPLPVPGVL

SEQ ID NO: 108294 - protein, 10 aa, Homo sapiens
  misc_feature (1)..(10): Table A2; Target 5452; NY-ESO1; ENSG00000184033; HLA-C*04:01;
QDAPPLPVPG

SEQ ID NO: 108295 - protein, 10 aa, Homo sapiens
  misc_feature (1)..(10): Table A2; Target 5453; NY-ESO1; ENSG00000184033; HLA-C*06:02;
QDAPPLPVPG

SEQ ID NO: 108296 - protein, 9 aa, Homo sapiens
  misc_feature (1)..(9): Table A2; Target 5454; NY-ESO1; ENSG00000184033; HLA-B*27:05;
QDAPPLPVP

SEQ ID NO: 108297 - protein, 9 aa, Homo sapiens
  misc_feature (1)..(9): Table A2; Target 5455; NY-ESO1; ENSG00000184033; HLA-B*40:02;
QDAPPLPVP

SEQ ID NO: 108298 - protein, 9 aa, Homo sapiens
  misc_feature (1)..(9): Table A2; Target 5456; NY-ESO1; ENSG00000184033; HLA-C*04:01;
QDAPPLPVP

SEQ ID NO: 108299 - protein, 9 aa, Homo sapiens
  misc_feature (1)..(9): Table A2; Target 5457; NY-ESO1; ENSG00000184033; HLA-C*06:02;
QDAPPLPVP

SEQ ID NO: 108300 - protein, 9 aa, Homo sapiens
  misc_feature (1)..(9): Table A2; Target 5458; NY-ESO1; ENSG00000184033; HLA-C*07:01;
QDAPPLPVP

SEQ ID NO: 108301 - protein, 9 aa, Homo sapiens
  misc_feature (1)..(9): Table A2; Target 5459; NY-ESO1; ENSG00000184033; HLA-C*07:02;
QDAPPLPVP

SEQ ID NO: 108302 - protein, 9 aa, Homo sapiens
  misc_feature (1)..(9): Table A2; Target 5460; NY-ESO1; ENSG00000184033; HLA-C*07:04;
QDAPPLPVP

SEQ ID NO: 108303 - protein, 9 aa, Homo sapiens
  misc_feature (1)..(9): Table A2; Target 5461; NY-ESO1; ENSG00000184033; HLA-C*12:03;
QDAPPLPVP

SEQ ID NO: 108304 - protein, 9 aa, Homo sapiens
  misc_feature (1)..(9): Table A2; Target 5462; NY-ESO1; ENSG00000184033; HLA-C*16:02;
QDAPPLPVP

SEQ ID NO: 108305 - protein, 8 aa, Homo sapiens
  misc_feature (1)..(8): Table A2; Target 5463; NY-ESO1; ENSG00000184033; HLA-B*37:01;
QDAPPLPV

SEQ ID NO: 108306 - protein, 11 aa, Homo sapiens
  misc_feature (1)..(11): Table A2; Target 5464; NY-ESO1; ENSG00000184033; HLA-A*31:01;
RASGPGGGAPR

SEQ ID NO: 108307 - protein, 11 aa, Homo sapiens
  misc_feature (1)..(11): Table A2; Target 5465; NY-ESO1; ENSG00000184033; HLA-A*33:01;
RASGPGGGAPR

SEQ ID NO: 108308 - protein, 11 aa, Homo sapiens
  misc_feature (1)..(11): Table A2; Target 5466; NY-ESO1; ENSG00000184033; HLA-A*33:03;
RASGPGGGAPR

SEQ ID NO: 108309 - protein, 11 aa, Homo sapiens
  misc_feature (1)..(11): Table A2; Target 5467; NY-ESO1; ENSG00000184033; HLA-A*68:01;
RASGPGGGAPR

SEQ ID NO: 108310 - protein, 11 aa, Homo sapiens
  misc_feature (1)..(11): Table A2; Target 5468; NY-ESO1; ENSG00000184033; HLA-B*27:05;
RASGPGGGAPR

SEQ ID NO: 108311 - protein, 11 aa, Homo sapiens
  misc_feature (1)..(11): Table A2; Target 5469; NY-ESO1; ENSG00000184033; HLA-C*07:06;
RASGPGGGAPR

SEQ ID NO: 108312 - protein, 11 aa, Homo sapiens
  misc_feature (1)..(11): Table A2; Target 5470; NY-ESO1; ENSG00000184033; HLA-A*32:01;
RGAGAARASGP

SEQ ID NO: 108313 - protein, 10 aa, Homo sapiens
  misc_feature (1)..(10): Table A2; Target 5471; NY-ESO1; ENSG00000184033; HLA-A*02:07;
RGPESRLLEF

SEQ ID NO: 108314 - protein, 10 aa, Homo sapiens
  misc_feature (1)..(10): Table A2; Target 5472; NY-ESO1; ENSG00000184033; HLA-A*24:02;
RGPESRLLEF

SEQ ID NO: 108315 - protein, 11 aa, Homo sapiens
  misc_feature (1)..(11): Table A2; Target 5473; NY-ESO1; ENSG00000184033; HLA-C*01:02;
RGPHGGAASGL

SEQ ID NO: 108316 - protein, 10 aa, Homo sapiens
  misc_feature (1)..(10): Table A2; Target 5474; NY-ESO1; ENSG00000184033; HLA-A*31:01;
RGPRGAGAAR

SEQ ID NO: 108317 - protein, 9 aa, Homo sapiens
  misc_feature (1)..(9): Table A2; Target 5475; NY-ESO1; ENSG00000184033; HLA-A*02:04;
RLLEFYLAM

SEQ ID NO: 108318 - protein, 9 aa, Homo sapiens
  misc_feature (1)..(9): Table A2; Target 5476; NY-ESO1; ENSG00000184033; HLA-A*02:07;
RLLEFYLAM

SEQ ID NO: 108319 - protein, 9 aa, Homo sapiens
  misc_feature (1)..(9): Table A2; Target 5477; NY-ESO1; ENSG00000184033; HLA-A*02:04;
SGNILTIRL

SEQ ID NO: 108320 - protein, 9 aa, Homo sapiens
  misc_feature (1)..(9): Table A2; Target 5478; NY-ESO1; ENSG00000184033; HLA-C*07:02;
SGNILTIRL

SEQ ID NO: 108321 - protein, 11 aa, Homo sapiens
  misc_feature (1)..(11): Table A2; Target 5479; NY-ESO1; ENSG00000184033; HLA-B*07:02;
SGPGGGAPRGP

SEQ ID NO: 108322 - protein, 11 aa, Homo sapiens
  misc_feature (1)..(11): Table A2; Target 5480; NY-ESO1; ENSG00000184033; HLA-C*04:01;
SGPGGGAPRGP

SEQ ID NO: 108323 - protein, 11 aa, Homo sapiens
  misc_feature (1)..(11): Table A2; Target 5481; NY-ESO1; ENSG00000184033; HLA-C*06:02;
SGPGGGAPRGP

SEQ ID NO: 108324 - protein, 11 aa, Homo sapiens
  misc_feature (1)..(11): Table A2; Target 5482; NY-ESO1; ENSG00000184033; HLA-C*07:01;
SGPGGGAPRGP

SEQ ID NO: 108325 - protein, 11 aa, Homo sapiens
  misc_feature (1)..(11): Table A2; Target 5483; NY-ESO1; ENSG00000184033; HLA-C*07:02;
SGPGGGAPRGP

SEQ ID NO: 108326 - protein, 11 aa, Homo sapiens
  misc_feature (1)..(11): Table A2; Target 5484; NY-ESO1; ENSG00000184033; HLA-C*16:02;
SGPGGGAPRGP

SEQ ID NO: 108327 - protein, 9 aa, Homo sapiens
  misc_feature (1)..(9): Table A2; Target 5485; NY-ESO1; ENSG00000184033; HLA-A*68:01;
SGPGGGAPR

SEQ ID NO: 108328 - protein, 9 aa, Homo sapiens
  misc_feature (1)..(9): Table A2; Target 5486; NY-ESO1; ENSG00000184033; HLA-C*01:02;
SGPGGGAPR

SEQ ID NO: 108329 - protein, 9 aa, Homo sapiens
  misc_feature (1)..(9): Table A2; Target 5487; NY-ESO1; ENSG00000184033; HLA-C*07:06;
SGPGGGAPR

SEQ ID NO: 108330 - protein, 8 aa, Homo sapiens
  misc_feature (1)..(8): Table A2; Target 5488; NY-ESO1; ENSG00000184033; HLA-C*01:02;
SGPGGGAP

SEQ ID NO: 108331 - protein, 9 aa, Homo sapiens
  misc_feature (1)..(9): Table A2; Target 5489; NY-ESO1; ENSG00000184033; HLA-A*02:04;
SISSCLQQL

SEQ ID NO: 108332 - protein, 9 aa, Homo sapiens
  misc_feature (1)..(9): Table A2; Target 5490; NY-ESO1; ENSG00000184033; HLA-A*24:02;
SISSCLQQL

SEQ ID NO: 108333 - protein, 9 aa, Homo sapiens
  misc_feature (1)..(9): Table A2; Target 5491; NY-ESO1; ENSG00000184033; HLA-A*68:02;
SISSCLQQL

SEQ ID NO: 108334 - protein, 9 aa, Homo sapiens
  misc_feature (1)..(9): Table A2; Target 5492; NY-ESO1; ENSG00000184033; HLA-C*07:04;
SISSCLQQL

SEQ ID NO: 108335 - protein, 11 aa, Homo sapiens
  misc_feature (1)..(11): Table A2; Target 5493; NY-ESO1; ENSG00000184033; HLA-A*02:01;
SLAQDAPPLPV

SEQ ID NO: 108336 - protein, 11 aa, Homo sapiens
  misc_feature (1)..(11): Table A2; Target 5494; NY-ESO1; ENSG00000184033; HLA-A*02:03;
SLAQDAPPLPV

SEQ ID NO: 108337 - protein, 9 aa, Homo sapiens
  misc_feature (1)..(9): Table A2; Target 5495; NY-ESO1; ENSG00000184033; HLA-A*02:01;
SLAQDAPPL

SEQ ID NO: 108338 - protein, 9 aa, Homo sapiens
  misc_feature (1)..(9): Table A2; Target 5496; NY-ESO1; ENSG00000184033; HLA-A*02:04;
SLAQDAPPL

SEQ ID NO: 108339 - protein, 9 aa, Homo sapiens
  misc_feature (1)..(9): Table A2; Target 5497; NY-ESO1; ENSG00000184033; HLA-B*35:03;
SLAQDAPPL

SEQ ID NO: 108340 - protein, 9 aa, Homo sapiens
  misc_feature (1)..(9): Table A2; Target 5498; NY-ESO1; ENSG00000184033; HLA-C*01:02;
SLAQDAPPL

SEQ ID NO: 108341 - protein, 9 aa, Homo sapiens
  misc_feature (1)..(9): Table A2; Target 5499; NY-ESO1; ENSG00000184033; HLA-A*02:01;
SLLMWITQC

SEQ ID NO: 108342 - protein, 9 aa, Homo sapiens
  misc_feature (1)..(9): Table A2; Target 5500; NY-ESO1; ENSG00000184033; HLA-A*02:04;
SLLMWITQC

SEQ ID NO: 108343 - protein, 10 aa, Homo sapiens
  misc_feature (1)..(10): Table A2; Target 5501; NY-ESO1; ENSG00000184033; HLA-A*30:01;
TAADHRQLQL

SEQ ID NO: 108344 - protein, 10 aa, Homo sapiens
  misc_feature (1)..(10): Table A2; Target 5502; NY-ESO1; ENSG00000184033; HLA-B*07:02;
TAADHRQLQL

SEQ ID NO: 108345 - protein, 10 aa, Homo sapiens
  misc_feature (1)..(10): Table A2; Target 5503; NY-ESO1; ENSG00000184033; HLA-C*07:02;
TAADHRQLQL

SEQ ID NO: 108346 - protein, 10 aa, Homo sapiens
  misc_feature (1)..(10): Table A2; Target 5504; NY-ESO1; ENSG00000184033; HLA-C*16:01;
TAADHRQLQL

SEQ ID NO: 108347 - protein, 10 aa, Homo sapiens
  misc_feature (1)..(10): Table A2; Target 5505; NY-ESO1; ENSG00000184033; HLA-C*16:02;
TAADHRQLQL

SEQ ID NO: 108348 - protein, 8 aa, Homo sapiens
  misc_feature (1)..(8): Table A2; Target 5506; NY-ESO1; ENSG00000184033; HLA-B*07:02;
TAADHRQL

SEQ ID NO: 108349 - protein, 8 aa, Homo sapiens
  misc_feature (1)..(8): Table A2; Target 5507; NY-ESO1; ENSG00000184033; HLA-B*08:01;
TAADHRQL

SEQ ID NO: 108350 - protein, 8 aa, Homo sapiens
  misc_feature (1)..(8): Table A2; Target 5508; NY-ESO1; ENSG00000184033; HLA-B*35:03;
TAADHRQL

SEQ ID NO: 108351 - protein, 8 aa, Homo sapiens
  misc_feature (1)..(8): Table A2; Target 5509; NY-ESO1; ENSG00000184033; HLA-C*03:03;
TAADHRQL

SEQ ID NO: 108352 - protein, 8 aa, Homo sapiens
  misc_feature (1)..(8): Table A2; Target 5510; NY-ESO1; ENSG00000184033; HLA-C*03:04;
TAADHRQL

SEQ ID NO: 108353 - protein, 8 aa, Homo sapiens
  misc_feature (1)..(8): Table A2; Target 5511; NY-ESO1; ENSG00000184033; HLA-C*06:02;
TAADHRQL

SEQ ID NO: 108354 - protein, 8 aa, Homo sapiens
  misc_feature (1)..(8): Table A2; Target 5512; NY-ESO1; ENSG00000184033; HLA-C*12:03;
TAADHRQL

SEQ ID NO: 108355 - protein, 8 aa, Homo sapiens
  misc_feature (1)..(8): Table A2; Target 5513; NY-ESO1; ENSG00000184033; HLA-C*16:01;
TAADHRQL

SEQ ID NO: 108356 - protein, 8 aa, Homo sapiens
  misc_feature (1)..(8): Table A2; Target 5514; NY-ESO1; ENSG00000184033; HLA-C*16:02;
TAADHRQL

SEQ ID NO: 108357 - protein, 10 aa, Homo sapiens
  misc_feature (1)..(10): Table A2; Target 5515; NY-ESO1; ENSG00000184033; HLA-A*33:03;
TPMEAELARR

SEQ ID NO: 108358 - protein, 10 aa, Homo sapiens
  misc_feature (1)..(10): Table A2; Target 5516; NY-ESO1; ENSG00000184033; HLA-A*68:01;
TPMEAELARR

SEQ ID NO: 108359 - protein, 10 aa, Homo sapiens
  misc_feature (1)..(10): Table A2; Target 5517; NY-ESO1; ENSG00000184033; HLA-C*07:06;
TPMEAELARR

SEQ ID NO: 108360 - protein, 9 aa, Homo sapiens
  misc_feature (1)..(9): Table A2; Target 5518; NY-ESO1; ENSG00000184033; HLA-A*33:03;
TPMEAELAR

SEQ ID NO: 108361 - protein, 9 aa, Homo sapiens
  misc_feature (1)..(9): Table A2; Target 5519; NY-ESO1; ENSG00000184033; HLA-A*68:01;
TPMEAELAR

SEQ ID NO: 108362 - protein, 9 aa, Homo sapiens
  misc_feature (1)..(9): Table A2; Target 5520; NY-ESO1; ENSG00000184033; HLA-B*35:01;
TPMEAELAR

SEQ ID NO: 108363 - protein, 9 aa, Homo sapiens
  misc_feature (1)..(9): Table A2; Target 5521; NY-ESO1; ENSG00000184033; HLA-B*35:03;
TPMEAELAR

SEQ ID NO: 108364 - protein, 9 aa, Homo sapiens
  misc_feature (1)..(9): Table A2; Target 5522; NY-ESO1; ENSG00000184033; HLA-B*54:01;
TPMEAELAR

SEQ ID NO: 108365 - protein, 9 aa, Homo sapiens
  misc_feature (1)..(9): Table A2; Target 5523; NY-ESO1; ENSG00000184033; HLA-B*55:01;
TPMEAELAR

SEQ ID NO: 108366 - protein, 9 aa, Homo sapiens
  misc_feature (1)..(9): Table A2; Target 5524; NY-ESO1; ENSG00000184033; HLA-B*56:01;
TPMEAELAR

SEQ ID NO: 108367 - protein, 9 aa, Homo sapiens
  misc_feature (1)..(9): Table A2; Target 5525; NY-ESO1; ENSG00000184033; HLA-C*03:03;
TPMEAELAR

SEQ ID NO: 108368 - protein, 9 aa, Homo sapiens
  misc_feature (1)..(9): Table A2; Target 5526; NY-ESO1; ENSG00000184033; HLA-C*07:06;
TPMEAELAR

SEQ ID NO: 108369 - protein, 8 aa, Homo sapiens
  misc_feature (1)..(8): Table A2; Target 5527; NY-ESO1; ENSG00000184033; HLA-B*56:01;
TPMEAELA

SEQ ID NO: 108370 - protein, 11 aa, Homo sapiens
  misc_feature (1)..(11): Table A2; Target 5528; NY-ESO1; ENSG00000184033; HLA-A*68:02;
TVSGNILTIRL

SEQ ID NO: 108371 - protein, 10 aa, Homo sapiens
  misc_feature (1)..(10): Table A2; Target 5529; NY-ESO1; ENSG00000184033; HLA-A*31:01;
TVSGNILTIR

SEQ ID NO: 108372 - protein, 10 aa, Homo sapiens
  misc_feature (1)..(10): Table A2; Target 5530; NY-ESO1; ENSG00000184033; HLA-A*33:03;
TVSGNILTIR

SEQ ID NO: 108373 - protein, 10 aa, Homo sapiens
  misc_feature (1)..(10): Table A2; Target 5531; NY-ESO1; ENSG00000184033; HLA-A*68:01;
TVSGNILTIR

SEQ ID NO: 108374 - protein, 10 aa, Homo sapiens
  misc_feature (1)..(10): Table A2; Target 5532; NY-ESO1; ENSG00000184033; HLA-A*68:02;
TVSGNILTIR

SEQ ID NO: 108375 - protein, 10 aa, Homo sapiens
  misc_feature (1)..(10): Table A2; Target 5533; NY-ESO1; ENSG00000184033; HLA-C*07:06;
TVSGNILTIR

SEQ ID NO: 108376 - protein, 9 aa, Homo sapiens
  misc_feature (1)..(9): Table A2; Target 5534; NY-ESO1; ENSG00000184033; HLA-A*02:01;
TVSGNILTI

SEQ ID NO: 108377 - protein, 9 aa, Homo sapiens
  misc_feature (1)..(9): Table A2; Target 5535; NY-ESO1; ENSG00000184033; HLA-A*02:03;
TVSGNILTI

SEQ ID NO: 108378 - protein, 9 aa, Homo sapiens
  misc_feature (1)..(9): Table A2; Target 5536; NY-ESO1; ENSG00000184033; HLA-A*02:04;
TVSGNILTI

SEQ ID NO: 108379 - protein, 9 aa, Homo sapiens
  misc_feature (1)..(9): Table A2; Target 5537; NY-ESO1; ENSG00000184033; HLA-A*02:07;
TVSGNILTI

SEQ ID NO: 108380 - protein, 9 aa, Homo sapiens
  misc_feature (1)..(9): Table A2; Target 5538; NY-ESO1; ENSG00000184033; HLA-A*03:01;
TVSGNILTI

SEQ ID NO: 108381 - protein, 9 aa, Homo sapiens
  misc_feature (1)..(9): Table A2; Target 5539; NY-ESO1; ENSG00000184033; HLA-A*11:01;
TVSGNILTI

SEQ ID NO: 108382 - protein, 9 aa, Homo sapiens
  misc_feature (1)..(9): Table A2; Target 5540; NY-ESO1; ENSG00000184033; HLA-A*23:01;
TVSGNILTI

SEQ ID NO: 108383 - protein, 9 aa, Homo sapiens
  misc_feature (1)..(9): Table A2; Target 5541; NY-ESO1; ENSG00000184033; HLA-A*25:01;
TVSGNILTI

SEQ ID NO: 108384 - protein, 9 aa, Homo sapiens
  misc_feature (1)..(9): Table A2; Target 5542; NY-ESO1; ENSG00000184033; HLA-A*26:01;
TVSGNILTI

SEQ ID NO: 108385 - protein, 9 aa, Homo sapiens
  misc_feature (1)..(9): Table A2; Target 5543; NY-ESO1; ENSG00000184033; HLA-A*30:01;
TVSGNILTI

SEQ ID NO: 108386 - protein, 9 aa, Homo sapiens
  misc_feature (1)..(9): Table A2; Target 5544; NY-ESO1; ENSG00000184033; HLA-A*32:01;
TVSGNILTI

SEQ ID NO: 108387 - protein, 9 aa, Homo sapiens
  misc_feature (1)..(9): Table A2; Target 5545; NY-ESO1; ENSG00000184033; HLA-A*68:01;
TVSGNILTI

SEQ ID NO: 108388 - protein, 9 aa, Homo sapiens
  misc_feature (1)..(9): Table A2; Target 5546; NY-ESO1; ENSG00000184033; HLA-A*68:02;
TVSGNILTI

SEQ ID NO: 108389 - protein, 9 aa, Homo sapiens
  misc_feature (1)..(9): Table A2; Target 5547; NY-ESO1; ENSG00000184033; HLA-B*13:02;
TVSGNILTI

SEQ ID NO: 108390 - protein, 9 aa, Homo sapiens
  misc_feature (1)..(9): Table A2; Target 5548; NY-ESO1; ENSG00000184033; HLA-B*27:05;
TVSGNILTI

SEQ ID NO: 108391 - protein, 9 aa, Homo sapiens
  misc_feature (1)..(9): Table A2; Target 5549; NY-ESO1; ENSG00000184033; HLA-B*35:01;
TVSGNILTI

SEQ ID NO: 108392 - protein, 9 aa, Homo sapiens
  misc_feature (1)..(9): Table A2; Target 5550; NY-ESO1; ENSG00000184033; HLA-B*35:03;
TVSGNILTI

SEQ ID NO: 108393 - protein, 9 aa, Homo sapiens
  misc_feature (1)..(9): Table A2; Target 5551; NY-ESO1; ENSG00000184033; HLA-B*38:01;
TVSGNILTI

SEQ ID NO: 108394 - protein, 9 aa, Homo sapiens
  misc_feature (1)..(9): Table A2; Target 5552; NY-ESO1; ENSG00000184033; HLA-B*39:01;
TVSGNILTI

SEQ ID NO: 108395 - protein, 9 aa, Homo sapiens
  misc_feature (1)..(9): Table A2; Target 5553; NY-ESO1; ENSG00000184033; HLA-B*40:02;
TVSGNILTI

SEQ ID NO: 108396 - protein, 9 aa, Homo sapiens
  misc_feature (1)..(9): Table A2; Target 5554; NY-ESO1; ENSG00000184033; HLA-B*49:01;
TVSGNILTI

SEQ ID NO: 108397 - protein, 9 aa, Homo sapiens
  misc_feature (1)..(9): Table A2; Target 5555; NY-ESO1; ENSG00000184033; HLA-B*51:01;
TVSGNILTI

SEQ ID NO: 108398 - protein, 9 aa, Homo sapiens
  misc_feature (1)..(9): Table A2; Target 5556; NY-ESO1; ENSG00000184033; HLA-B*55:01;
TVSGNILTI

SEQ ID NO: 108399 - protein, 9 aa, Homo sapiens
  misc_feature (1)..(9): Table A2; Target 5557; NY-ESO1; ENSG00000184033; HLA-B*58:01;
TVSGNILTI

SEQ ID NO: 108400 - protein, 9 aa, Homo sapiens
  misc_feature (1)..(9): Table A2; Target 5558; NY-ESO1; ENSG00000184033; HLA-C*02:02;
TVSGNILTI

SEQ ID NO: 108401 - protein, 9 aa, Homo sapiens
  misc_feature (1)..(9): Table A2; Target 5559; NY-ESO1; ENSG00000184033; HLA-C*03:04;
TVSGNILTI

SEQ ID NO: 108402 - protein, 9 aa, Homo sapiens
  misc_feature (1)..(9): Table A2; Target 5560; NY-ESO1; ENSG00000184033; HLA-C*04:01;
TVSGNILTI

SEQ ID NO: 108403 - protein, 9 aa, Homo sapiens
  misc_feature (1)..(9): Table A2; Target 5561; NY-ESO1; ENSG00000184033; HLA-C*06:02;
TVSGNILTI

SEQ ID NO: 108404 - protein, 9 aa, Homo sapiens
  misc_feature (1)..(9): Table A2; Target 5562; NY-ESO1; ENSG00000184033; HLA-C*07:04;
TVSGNILTI

SEQ ID NO: 108405 - protein, 9 aa, Homo sapiens
  misc_feature (1)..(9): Table A2; Target 5563; NY-ESO1; ENSG00000184033; HLA-C*07:06;
TVSGNILTI

SEQ ID NO: 108406 - protein, 9 aa, Homo sapiens
  misc_feature (1)..(9): Table A2; Target 5564; NY-ESO1; ENSG00000184033; HLA-C*12:03;
TVSGNILTI

SEQ ID NO: 108407 - protein, 9 aa, Homo sapiens
  misc_feature (1)..(9): Table A2; Target 5565; NY-ESO1; ENSG00000184033; HLA-C*16:02;
TVSGNILTI

SEQ ID NO: 108408 - protein, 8 aa, Homo sapiens
  misc_feature (1)..(8): Table A2; Target 5566; NY-ESO1; ENSG00000184033; HLA-A*02:01;
VLLKEFTV

SEQ ID NO: 108409 - protein, 8 aa, Homo sapiens
  misc_feature (1)..(8): Table A2; Target 5567; NY-ESO1; ENSG00000184033; HLA-A*02:04;
VLLKEFTV

SEQ ID NO: 108410 - protein, 9 aa, Homo sapiens
  misc_feature (1)..(9): Table A2; Target 5568; NY-ESO1; ENSG00000184033; HLA-A*31:01;
VSGNILTIR

SEQ ID NO: 108411 - protein, 9 aa, Homo sapiens
  misc_feature (1)..(9): Table A2; Target 5569; NY-ESO1; ENSG00000184033; HLA-A*33:03;
VSGNILTIR

SEQ ID NO: 108412 - protein, 9 aa, Homo sapiens
  misc_feature (1)..(9): Table A2; Target 5570; NY-ESO1; ENSG00000184033; HLA-A*68:01;
VSGNILTIR

SEQ ID NO: 108413 - protein, 9 aa, Homo sapiens
  misc_feature (1)..(9): Table A2; Target 5571; NY-ESO1; ENSG00000184033; HLA-C*07:06;
VSGNILTIR

SEQ ID NO: 108414 - protein, 8 aa, Homo sapiens
  misc_feature (1)..(8): Table A2; Target 5572; NY-ESO1; ENSG00000184033; HLA-A*23:01;
VSGNILTI

SEQ ID NO: 108415 - protein, 8 aa, Homo sapiens
  misc_feature (1)..(8): Table A2; Target 5573; NY-ESO1; ENSG00000184033; HLA-B*13:02;
VSGNILTI

SEQ ID NO: 108416 - protein, 8 aa, Homo sapiens
  misc_feature (1)..(8): Table A2; Target 5574; NY-ESO1; ENSG00000184033; HLA-B*51:01;
VSGNILTI

SEQ ID NO: 108417 - protein, 8 aa, Homo sapiens
  misc_feature (1)..(8): Table A2; Target 5575; NY-ESO1; ENSG00000184033; HLA-B*58:01;
VSGNILTI

SEQ ID NO: 108418 - protein, 10 aa, Homo sapiens
  misc_feature (1)..(10): Table A2; Target 5576; NY-ESO1; ENSG00000184033; HLA-C*07:01;
YLAMPFATPM

SEQ ID NO: 108419 - protein, 10 aa, Homo sapiens
  misc_feature (1)..(10): Table A2; Target 5577; WT1; ENSG00000184937; HLA-A*25:01;
AAGSSSSVKW

SEQ ID NO: 108420 - protein, 10 aa, Homo sapiens
  misc_feature (1)..(10): Table A2; Target 5578; WT1; ENSG00000184937; HLA-B*27:02;
AAGSSSSVKW

SEQ ID NO: 108421 - protein, 10 aa, Homo sapiens
  misc_feature (1)..(10): Table A2; Target 5579; WT1; ENSG00000184937; HLA-B*44:02;
AAGSSSSVKW

SEQ ID NO: 108422 - protein, 10 aa, Homo sapiens
  misc_feature (1)..(10): Table A2; Target 5580; WT1; ENSG00000184937; HLA-B*44:03;
AAGSSSSVKW

SEQ ID NO: 108423 - protein, 10 aa, Homo sapiens
  misc_feature (1)..(10): Table A2; Target 5581; WT1; ENSG00000184937; HLA-B*58:01;
AAGSSSSVKW

SEQ ID NO: 108424 - protein, 10 aa, Homo sapiens
  misc_feature (1)..(10): Table A2; Target 5582; WT1; ENSG00000184937; HLA-C*16:04;
AAGSSSSVKW

SEQ ID NO: 108425 - protein, 9 aa, Homo sapiens
  misc_feature (1)..(9): Table A2; Target 5583; WT1; ENSG00000184937; HLA-A*03:02;
AAGSSSSVK

SEQ ID NO: 108426 - protein, 10 aa, Homo sapiens
  misc_feature (1)..(10): Table A2; Target 5584; WT1; ENSG00000184937; HLA-A*03:01;
AAQFPNHSFK

SEQ ID NO: 108427 - protein, 10 aa, Homo sapiens
  misc_feature (1)..(10): Table A2; Target 5585; WT1; ENSG00000184937; HLA-A*03:02;
AAQFPNHSFK

SEQ ID NO: 108428 - protein, 10 aa, Homo sapiens
  misc_feature (1)..(10): Table A2; Target 5586; WT1; ENSG00000184937; HLA-A*11:01;
AAQFPNHSFK

SEQ ID NO: 108429 - protein, 10 aa, Homo sapiens
  misc_feature (1)..(10): Table A2; Target 5587; WT1; ENSG00000184937; HLA-B*27:02;
AAQFPNHSFK

SEQ ID NO: 108430 - protein, 9 aa, Homo sapiens
  misc_feature (1)..(9): Table A2; Target 5588; WT1; ENSG00000184937; HLA-A*23:01;
AAQFPNHSF

SEQ ID NO: 108431 - protein, 9 aa, Homo sapiens
  misc_feature (1)..(9): Table A2; Target 5589; WT1; ENSG00000184937; HLA-A*24:02;
AAQFPNHSF

SEQ ID NO: 108432 - protein, 9 aa, Homo sapiens
  misc_feature (1)..(9): Table A2; Target 5590; WT1; ENSG00000184937; HLA-A*30:02;
AAQFPNHSF

SEQ ID NO: 108433 - protein, 9 aa, Homo sapiens
  misc_feature (1)..(9): Table A2; Target 5591; WT1; ENSG00000184937; HLA-A*32:01;
AAQFPNHSF

SEQ ID NO: 108434 - protein, 9 aa, Homo sapiens
  misc_feature (1)..(9): Table A2; Target 5592; WT1; ENSG00000184937; HLA-B*07:02;
AAQFPNHSF

SEQ ID NO: 108435 - protein, 9 aa, Homo sapiens
  misc_feature (1)..(9): Table A2; Target 5593; WT1; ENSG00000184937; HLA-B*15:01;
AAQFPNHSF

SEQ ID NO: 108436 - protein, 9 aa, Homo sapiens
  misc_feature (1)..(9): Table A2; Target 5594; WT1; ENSG00000184937; HLA-B*15:03;
AAQFPNHSF

SEQ ID NO: 108437 - protein, 9 aa, Homo sapiens
  misc_feature (1)..(9): Table A2; Target 5595; WT1; ENSG00000184937; HLA-B*35:01;
AAQFPNHSF

SEQ ID NO: 108438 - protein, 9 aa, Homo sapiens
  misc_feature (1)..(9): Table A2; Target 5596; WT1; ENSG00000184937; HLA-B*37:01;
AAQFPNHSF

SEQ ID NO: 108439 - protein, 9 aa, Homo sapiens
  misc_feature (1)..(9): Table A2; Target 5597; WT1; ENSG00000184937; HLA-B*39:01;
AAQFPNHSF

SEQ ID NO: 108440 - protein, 9 aa, Homo sapiens
  misc_feature (1)..(9): Table A2; Target 5598; WT1; ENSG00000184937; HLA-B*44:02;
AAQFPNHSF

SEQ ID NO: 108441 - protein, 9 aa, Homo sapiens
  misc_feature (1)..(9): Table A2; Target 5599; WT1; ENSG00000184937; HLA-B*46:01;
AAQFPNHSF

SEQ ID NO: 108442 - protein, 9 aa, Homo sapiens
  misc_feature (1)..(9): Table A2; Target 5600; WT1; ENSG00000184937; HLA-B*57:01;
AAQFPNHSF

SEQ ID NO: 108443 - protein, 9 aa, Homo sapiens
  misc_feature (1)..(9): Table A2; Target 5601; WT1; ENSG00000184937; HLA-B*58:01;
AAQFPNHSF

SEQ ID NO: 108444 - protein, 9 aa, Homo sapiens
  misc_feature (1)..(9): Table A2; Target 5602; WT1; ENSG00000184937; HLA-C*01:02;
AAQFPNHSF

SEQ ID NO: 108445 - protein, 9 aa, Homo sapiens
  misc_feature (1)..(9): Table A2; Target 5603; WT1; ENSG00000184937; HLA-C*02:02;
AAQFPNHSF

SEQ ID NO: 108446 - protein, 9 aa, Homo sapiens
  misc_feature (1)..(9): Table A2; Target 5604; WT1; ENSG00000184937; HLA-C*03:03;
AAQFPNHSF

SEQ ID NO: 108447 - protein, 9 aa, Homo sapiens
  misc_feature (1)..(9): Table A2; Target 5605; WT1; ENSG00000184937; HLA-C*03:04;
AAQFPNHSF

SEQ ID NO: 108448 - protein, 9 aa, Homo sapiens
  misc_feature (1)..(9): Table A2; Target 5606; WT1; ENSG00000184937; HLA-C*05:01;
AAQFPNHSF

SEQ ID NO: 108449 - protein, 9 aa, Homo sapiens
  misc_feature (1)..(9): Table A2; Target 5607; WT1; ENSG00000184937; HLA-C*07:04;
AAQFPNHSF

SEQ ID NO: 108450 - protein, 9 aa, Homo sapiens
  misc_feature (1)..(9): Table A2; Target 5608; WT1; ENSG00000184937; HLA-C*12:03;
AAQFPNHSF

SEQ ID NO: 108451 - protein, 9 aa, Homo sapiens
  misc_feature (1)..(9): Table A2; Target 5609; WT1; ENSG00000184937; HLA-C*14:02;
AAQFPNHSF

SEQ ID NO: 108452 - protein, 9 aa, Homo sapiens
  misc_feature (1)..(9): Table A2; Target 5610; WT1; ENSG00000184937; HLA-C*16:01;
AAQFPNHSF

SEQ ID NO: 108453 - protein, 9 aa, Homo sapiens
  misc_feature (1)..(9): Table A2; Target 5611; WT1; ENSG00000184937; HLA-C*16:02;
AAQFPNHSF

SEQ ID NO: 108454 - protein, 9 aa, Homo sapiens
  misc_feature (1)..(9): Table A2; Target 5612; WT1; ENSG00000184937; HLA-C*16:04;
AAQFPNHSF

SEQ ID NO: 108455 - protein, 9 aa, Homo sapiens
  misc_feature (1)..(9): Table A2; Target 5613; WT1; ENSG00000184937; HLA-B*40:01;
AEPHEEQCL

SEQ ID NO: 108456 - protein, 9 aa, Homo sapiens
  misc_feature (1)..(9): Table A2; Target 5614; WT1; ENSG00000184937; HLA-B*44:03;
AEPHEEQCL

SEQ ID NO: 108457 - protein, 9 aa, Homo sapiens
  misc_feature (1)..(9): Table A2; Target 5615; WT1; ENSG00000184937; HLA-A*32:01;
AGSSSSVKW

SEQ ID NO: 108458 - protein, 9 aa, Homo sapiens
  misc_feature (1)..(9): Table A2; Target 5616; WT1; ENSG00000184937; HLA-B*27:02;
AGSSSSVKW

SEQ ID NO: 108459 - protein, 9 aa, Homo sapiens
  misc_feature (1)..(9): Table A2; Target 5617; WT1; ENSG00000184937; HLA-B*44:02;
AGSSSSVKW

SEQ ID NO: 108460 - protein, 9 aa, Homo sapiens
  misc_feature (1)..(9): Table A2; Target 5618; WT1; ENSG00000184937; HLA-B*44:03;
AGSSSSVKW

SEQ ID NO: 108461 - protein, 9 aa, Homo sapiens
  misc_feature (1)..(9): Table A2; Target 5619; WT1; ENSG00000184937; HLA-B*58:01;
AGSSSSVKW

SEQ ID NO: 108462 - protein, 9 aa, Homo sapiens
  misc_feature (1)..(9): Table A2; Target 5620; WT1; ENSG00000184937; HLA-C*12:03;
AGSSSSVKW

SEQ ID NO: 108463 - protein, 9 aa, Homo sapiens
  misc_feature (1)..(9): Table A2; Target 5621; WT1; ENSG00000184937; HLA-C*16:01;
AGSSSSVKW

SEQ ID NO: 108464 - protein, 9 aa, Homo sapiens
  misc_feature (1)..(9): Table A2; Target 5622; WT1; ENSG00000184937; HLA-C*16:04;
AGSSSSVKW

SEQ ID NO: 108465 - protein, 10 aa, Homo sapiens
  misc_feature (1)..(10): Table A2; Target 5623; WT1; ENSG00000184937; HLA-A*02:03;
AIRNQGYSTV

SEQ ID NO: 108466 - protein, 9 aa, Homo sapiens
  misc_feature (1)..(9): Table A2; Target 5624; WT1; ENSG00000184937; HLA-A*02:01;
ALLPAVPSL

SEQ ID NO: 108467 - protein, 9 aa, Homo sapiens
  misc_feature (1)..(9): Table A2; Target 5625; WT1; ENSG00000184937; HLA-A*02:03;
ALLPAVPSL

SEQ ID NO: 108468 - protein, 9 aa, Homo sapiens
  misc_feature (1)..(9): Table A2; Target 5626; WT1; ENSG00000184937; HLA-A*02:04;
ALLPAVPSL

SEQ ID NO: 108469 - protein, 9 aa, Homo sapiens
  misc_feature (1)..(9): Table A2; Target 5627; WT1; ENSG00000184937; HLA-A*02:07;
ALLPAVPSL

SEQ ID NO: 108470 - protein, 9 aa, Homo sapiens
  misc_feature (1)..(9): Table A2; Target 5628; WT1; ENSG00000184937; HLA-A*03:01;
ALLPAVPSL

SEQ ID NO: 108471 - protein, 9 aa, Homo sapiens
  misc_feature (1)..(9): Table A2; Target 5629; WT1; ENSG00000184937; HLA-A*03:02;
ALLPAVPSL

SEQ ID NO: 108472 - protein, 9 aa, Homo sapiens
  misc_feature (1)..(9): Table A2; Target 5630; WT1; ENSG00000184937; HLA-A*23:01;
ALLPAVPSL

SEQ ID NO: 108473 - protein, 9 aa, Homo sapiens
  misc_feature (1)..(9): Table A2; Target 5631; WT1; ENSG00000184937; HLA-A*24:02;
ALLPAVPSL

SEQ ID NO: 108474 - protein, 9 aa, Homo sapiens
  misc_feature (1)..(9): Table A2; Target 5632; WT1; ENSG00000184937; HLA-A*25:01;
ALLPAVPSL

SEQ ID NO: 108475 - protein, 9 aa, Homo sapiens
  misc_feature (1)..(9): Table A2; Target 5633; WT1; ENSG00000184937; HLA-A*29:02;
ALLPAVPSL

SEQ ID NO: 108476 - protein, 9 aa, Homo sapiens
  misc_feature (1)..(9): Table A2; Target 5634; WT1; ENSG00000184937; HLA-A*30:01;
ALLPAVPSL

SEQ ID NO: 108477 - protein, 9 aa, Homo sapiens
  misc_feature (1)..(9): Table A2; Target 5635; WT1; ENSG00000184937; HLA-A*31:01;
ALLPAVPSL

SEQ ID NO: 108478 - protein, 9 aa, Homo sapiens
  misc_feature (1)..(9): Table A2; Target 5636; WT1; ENSG00000184937; HLA-A*32:01;
ALLPAVPSL

SEQ ID NO: 108479 - protein, 9 aa, Homo sapiens
  misc_feature (1)..(9): Table A2; Target 5637; WT1; ENSG00000184937; HLA-B*07:02;
ALLPAVPSL

SEQ ID NO: 108480 - protein, 9 aa, Homo sapiens
  misc_feature (1)..(9): Table A2; Target 5638; WT1; ENSG00000184937; HLA-B*13:02;
ALLPAVPSL

SEQ ID NO: 108481 - protein, 9 aa, Homo sapiens
  misc_feature (1)..(9): Table A2; Target 5639; WT1; ENSG00000184937; HLA-B*15:01;
ALLPAVPSL

SEQ ID NO: 108482 - protein, 9 aa, Homo sapiens
  misc_feature (1)..(9): Table A2; Target 5640; WT1; ENSG00000184937; HLA-B*15:03;
ALLPAVPSL

SEQ ID NO: 108483 - protein, 9 aa, Homo sapiens
  misc_feature (1)..(9): Table A2; Target 5641; WT1; ENSG00000184937; HLA-B*37:01;
ALLPAVPSL

SEQ ID NO: 108484 - protein, 9 aa, Homo sapiens
  misc_feature (1)..(9): Table A2; Target 5642; WT1; ENSG00000184937; HLA-B*40:01;
ALLPAVPSL

SEQ ID NO: 108485 - protein, 9 aa, Homo sapiens
  misc_feature (1)..(9): Table A2; Target 5643; WT1; ENSG00000184937; HLA-B*40:02;
ALLPAVPSL

SEQ ID NO: 108486 - protein, 9 aa, Homo sapiens
  misc_feature (1)..(9): Table A2; Target 5644; WT1; ENSG00000184937; HLA-B*46:01;
ALLPAVPSL

SEQ ID NO: 108487 - protein, 9 aa, Homo sapiens
  misc_feature (1)..(9): Table A2; Target 5645; WT1; ENSG00000184937; HLA-B*55:01;
ALLPAVPSL

SEQ ID NO: 108488 - protein, 9 aa, Homo sapiens
  misc_feature (1)..(9): Table A2; Target 5646; WT1; ENSG00000184937; HLA-B*58:01;
ALLPAVPSL

SEQ ID NO: 108489 - protein, 9 aa, Homo sapiens
  misc_feature (1)..(9): Table A2; Target 5647; WT1; ENSG00000184937; HLA-C*01:02;
ALLPAVPSL

SEQ ID NO: 108490 - protein, 9 aa, Homo sapiens
  misc_feature (1)..(9): Table A2; Target 5648; WT1; ENSG00000184937; HLA-C*02:02;
ALLPAVPSL

SEQ ID NO: 108491 - protein, 9 aa, Homo sapiens
  misc_feature (1)..(9): Table A2; Target 5649; WT1; ENSG00000184937; HLA-C*03:03;
ALLPAVPSL

SEQ ID NO: 108492 - protein, 9 aa, Homo sapiens
  misc_feature (1)..(9): Table A2; Target 5650; WT1; ENSG00000184937; HLA-C*03:04;
ALLPAVPSL

SEQ ID NO: 108493 - protein, 9 aa, Homo sapiens
  misc_feature (1)..(9): Table A2; Target 5651; WT1; ENSG00000184937; HLA-C*07:04;
ALLPAVPSL

SEQ ID NO: 108494 - protein, 9 aa, Homo sapiens
  misc_feature (1)..(9): Table A2; Target 5652; WT1; ENSG00000184937; HLA-C*14:02;
ALLPAVPSL

SEQ ID NO: 108495 - protein, 10 aa, Homo sapiens
  misc_feature (1)..(10): Table A2; Target 5653; WT1; ENSG00000184937; HLA-A*25:01;
ALPVSGAAQW

SEQ ID NO: 108496 - protein, 9 aa, Homo sapiens
  misc_feature (1)..(9): Table A2; Target 5654; WT1; ENSG00000184937; HLA-C*01:02;
ALPVSGAAQ

SEQ ID NO: 108497 - protein, 11 aa, Homo sapiens
  misc_feature (1)..(11): Table A2; Target 5655; WT1; ENSG00000184937; HLA-B*07:02;
APPGASAYGSL

SEQ ID NO: 108498 - protein, 11 aa, Homo sapiens
  misc_feature (1)..(11): Table A2; Target 5656; WT1; ENSG00000184937; HLA-C*01:02;
APPGASAYGSL

SEQ ID NO: 108499 - protein, 11 aa, Homo sapiens
  misc_feature (1)..(11): Table A2; Target 5657; WT1; ENSG00000184937; HLA-C*07:02;
APPGASAYGSL

SEQ ID NO: 108500 - protein, 10 aa, Homo sapiens
  misc_feature (1)..(10): Table A2; Target 5658; WT1; ENSG00000184937; HLA-C*04:01;
APPPAPPPPP

SEQ ID NO: 108501 - protein, 9 aa, Homo sapiens
  misc_feature (1)..(9): Table A2; Target 5659; WT1; ENSG00000184937; HLA-C*04:01;
APPPAPPPP

SEQ ID NO: 108502 - protein, 10 aa, Homo sapiens
  misc_feature (1)..(10): Table A2; Target 5660; WT1; ENSG00000184937; HLA-C*04:01;
APPPPPPPPP

SEQ ID NO: 108503 - protein, 9 aa, Homo sapiens
  misc_feature (1)..(9): Table A2; Target 5661; WT1; ENSG00000184937; HLA-B*56:01;
APPPPPPPP

SEQ ID NO: 108504 - protein, 9 aa, Homo sapiens
  misc_feature (1)..(9): Table A2; Target 5662; WT1; ENSG00000184937; HLA-C*04:01;
APPPPPPPP

SEQ ID NO: 108505 - protein, 11 aa, Homo sapiens
  misc_feature (1)..(11): Table A2; Target 5663; WT1; ENSG00000184937; HLA-B*07:02;
APTLVRSASET

SEQ ID NO: 108506 - protein, 9 aa, Homo sapiens
  misc_feature (1)..(9): Table A2; Target 5664; WT1; ENSG00000184937; HLA-B*56:01;
APTLVRSAS

SEQ ID NO: 108507 - protein, 8 aa, Homo sapiens
  misc_feature (1)..(8): Table A2; Target 5665; WT1; ENSG00000184937; HLA-B*07:02;
APTLVRSA

SEQ ID NO: 108508 - protein, 8 aa, Homo sapiens
  misc_feature (1)..(8): Table A2; Target 5666; WT1; ENSG00000184937; HLA-B*54:01;
APTLVRSA

SEQ ID NO: 108509 - protein, 8 aa, Homo sapiens
  misc_feature (1)..(8): Table A2; Target 5667; WT1; ENSG00000184937; HLA-B*55:01;
APTLVRSA

SEQ ID NO: 108510 - protein, 8 aa, Homo sapiens
  misc_feature (1)..(8): Table A2; Target 5668; WT1; ENSG00000184937; HLA-B*56:01;
APTLVRSA

SEQ ID NO: 108511 - protein, 11 aa, Homo sapiens
  misc_feature (1)..(11): Table A2; Target 5669; WT1; ENSG00000184937; HLA-B*56:01;
APVLDFAPPGA

SEQ ID NO: 108512 - protein, 10 aa, Homo sapiens
  misc_feature (1)..(10): Table A2; Target 5670; WT1; ENSG00000184937; HLA-B*56:01;
APVLDFAPPG

SEQ ID NO: 108513 - protein, 9 aa, Homo sapiens
  misc_feature (1)..(9): Table A2; Target 5671; WT1; ENSG00000184937; HLA-B*56:01;
APVLDFAPP

SEQ ID NO: 108514 - protein, 8 aa, Homo sapiens
  misc_feature (1)..(8): Table A2; Target 5672; WT1; ENSG00000184937; HLA-B*07:02;
APYLPSCL

SEQ ID NO: 108515 - protein, 8 aa, Homo sapiens
  misc_feature (1)..(8): Table A2; Target 5673; WT1; ENSG00000184937; HLA-B*08:01;
APYLPSCL

SEQ ID NO: 108516 - protein, 8 aa, Homo sapiens
  misc_feature (1)..(8): Table A2; Target 5674; WT1; ENSG00000184937; HLA-B*56:01;
APYLPSCL

SEQ ID NO: 108517 - protein, 9 aa, Homo sapiens
  misc_feature (1)..(9): Table A2; Target 5675; WT1; ENSG00000184937; HLA-A*03:01;
AQFPNHSFK

SEQ ID NO: 108518 - protein, 9 aa, Homo sapiens
  misc_feature (1)..(9): Table A2; Target 5676; WT1; ENSG00000184937; HLA-A*03:02;
AQFPNHSFK

SEQ ID NO: 108519 - protein, 9 aa, Homo sapiens
  misc_feature (1)..(9): Table A2; Target 5677; WT1; ENSG00000184937; HLA-A*11:01;
AQFPNHSFK

SEQ ID NO: 108520 - protein, 9 aa, Homo sapiens
  misc_feature (1)..(9): Table A2; Target 5678; WT1; ENSG00000184937; HLA-A*31:01;
AQFPNHSFK

SEQ ID NO: 108521 - protein, 9 aa, Homo sapiens
  misc_feature (1)..(9): Table A2; Target 5679; WT1; ENSG00000184937; HLA-B*27:05;
AQFPNHSFK

SEQ ID NO: 108522 - protein, 8 aa, Homo sapiens
  misc_feature (1)..(8): Table A2; Target 5680; WT1; ENSG00000184937; HLA-A*23:01;
AQFPNHSF

SEQ ID NO: 108523 - protein, 8 aa, Homo sapiens
  misc_feature (1)..(8): Table A2; Target 5681; WT1; ENSG00000184937; HLA-A*30:02;
AQFPNHSF

SEQ ID NO: 108524 - protein, 8 aa, Homo sapiens
  misc_feature (1)..(8): Table A2; Target 5682; WT1; ENSG00000184937; HLA-A*32:01;
AQFPNHSF

SEQ ID NO: 108525 - protein, 8 aa, Homo sapiens
  misc_feature (1)..(8): Table A2; Target 5683; WT1; ENSG00000184937; HLA-B*13:02;
AQFPNHSF

SEQ ID NO: 108526 - protein, 8 aa, Homo sapiens
  misc_feature (1)..(8): Table A2; Target 5684; WT1; ENSG00000184937; HLA-B*15:01;
AQFPNHSF

SEQ ID NO: 108527 - protein, 8 aa, Homo sapiens
  misc_feature (1)..(8): Table A2; Target 5685; WT1; ENSG00000184937; HLA-B*15:03;
AQFPNHSF

SEQ ID NO: 108528 - protein, 8 aa, Homo sapiens
  misc_feature (1)..(8): Table A2; Target 5686; WT1; ENSG00000184937; HLA-B*27:05;
AQFPNHSF

SEQ ID NO: 108529 - protein, 8 aa, Homo sapiens
  misc_feature (1)..(8): Table A2; Target 5687; WT1; ENSG00000184937; HLA-B*37:01;
AQFPNHSF

SEQ ID NO: 108530 - protein, 8 aa, Homo sapiens
  misc_feature (1)..(8): Table A2; Target 5688; WT1; ENSG00000184937; HLA-B*39:01;
AQFPNHSF

SEQ ID NO: 108531 - protein, 8 aa, Homo sapiens
  misc_feature (1)..(8): Table A2; Target 5689; WT1; ENSG00000184937; HLA-B*44:02;
AQFPNHSF

SEQ ID NO: 108532 - protein, 8 aa, Homo sapiens
  misc_feature (1)..(8): Table A2; Target 5690; WT1; ENSG00000184937; HLA-B*46:01;
AQFPNHSF

SEQ ID NO: 108533 - protein, 8 aa, Homo sapiens
  misc_feature (1)..(8): Table A2; Target 5691; WT1; ENSG00000184937; HLA-B*57:01;
AQFPNHSF

SEQ ID NO: 108534 - protein, 8 aa, Homo sapiens
  misc_feature (1)..(8): Table A2; Target 5692; WT1; ENSG00000184937; HLA-B*58:01;
AQFPNHSF

SEQ ID NO: 108535 - protein, 8 aa, Homo sapiens
  misc_feature (1)..(8): Table A2; Target 5693; WT1; ENSG00000184937; HLA-C*02:02;
AQFPNHSF

SEQ ID NO: 108536 - protein, 8 aa, Homo sapiens
  misc_feature (1)..(8): Table A2; Target 5694; WT1; ENSG00000184937; HLA-C*14:02;
AQFPNHSF

SEQ ID NO: 108537 - protein, 8 aa, Homo sapiens
  misc_feature (1)..(8): Table A2; Target 5695; WT1; ENSG00000184937; HLA-C*16:04;
AQFPNHSF

SEQ ID NO: 108538 - protein, 9 aa, Homo sapiens
  misc_feature (1)..(9): Table A2; Target 5696; WT1; ENSG00000184937; HLA-B*13:02;
AQWAPVLDF

SEQ ID NO: 108539 - protein, 9 aa, Homo sapiens
  misc_feature (1)..(9): Table A2; Target 5697; WT1; ENSG00000184937; HLA-B*15:01;
AQWAPVLDF

SEQ ID NO: 108540 - protein, 9 aa, Homo sapiens
  misc_feature (1)..(9): Table A2; Target 5698; WT1; ENSG00000184937; HLA-B*15:03;
AQWAPVLDF

SEQ ID NO: 108541 - protein, 9 aa, Homo sapiens
  misc_feature (1)..(9): Table A2; Target 5699; WT1; ENSG00000184937; HLA-B*27:05;
ARSDELVRH

SEQ ID NO: 108542 - protein, 10 aa, Homo sapiens
  misc_feature (1)..(10): Table A2; Target 5700; WT1; ENSG00000184937; HLA-C*16:01;
ASETSEKRPF

SEQ ID NO: 108543 - protein, 9 aa, Homo sapiens
  misc_feature (1)..(9): Table A2; Target 5701; WT1; ENSG00000184937; HLA-A*32:01;
ASSGQARMF

SEQ ID NO: 108544 - protein, 9 aa, Homo sapiens
  misc_feature (1)..(9): Table A2; Target 5702; WT1; ENSG00000184937; HLA-B*58:01;
ASSGQARMF

SEQ ID NO: 108545 - protein, 9 aa, Homo sapiens
  misc_feature (1)..(9): Table A2; Target 5703; WT1; ENSG00000184937; HLA-C*02:02;
ASSGQARMF

SEQ ID NO: 108546 - protein, 9 aa, Homo sapiens
  misc_feature (1)..(9): Table A2; Target 5704; WT1; ENSG00000184937; HLA-C*16:01;
ASSGQARMF

SEQ ID NO: 108547 - protein, 9 aa, Homo sapiens
  misc_feature (1)..(9): Table A2; Target 5705; WT1; ENSG00000184937; HLA-C*16:02;
ASSGQARMF

SEQ ID NO: 108548 - protein, 11 aa, Homo sapiens
  misc_feature (1)..(11): Table A2; Target 5706; WT1; ENSG00000184937; HLA-B*57:01;
CALPVSGAAQW

SEQ ID NO: 108549 - protein, 11 aa, Homo sapiens
  misc_feature (1)..(11): Table A2; Target 5707; WT1; ENSG00000184937; HLA-B*58:01;
CALPVSGAAQW

SEQ ID NO: 108550 - protein, 9 aa, Homo sapiens
  misc_feature (1)..(9): Table A2; Target 5708; WT1; ENSG00000184937; HLA-B*56:01;
CALPVSGAA

SEQ ID NO: 108551 - protein, 9 aa, Homo sapiens
  misc_feature (1)..(9): Table A2; Target 5709; WT1; ENSG00000184937; HLA-B*08:01;
DELVRHHNM

SEQ ID NO: 108552 - protein, 9 aa, Homo sapiens
  misc_feature (1)..(9): Table A2; Target 5710; WT1; ENSG00000184937; HLA-B*37:01;
DELVRHHNM

SEQ ID NO: 108553 - protein, 10 aa, Homo sapiens
  misc_feature (1)..(10): Table A2; Target 5711; WT1; ENSG00000184937; HLA-A*25:01;
DFAPPGASAY

SEQ ID NO: 108554 - protein, 10 aa, Homo sapiens
  misc_feature (1)..(10): Table A2; Target 5712; WT1; ENSG00000184937; HLA-A*26:01;
DFAPPGASAY

SEQ ID NO: 108555 - protein, 10 aa, Homo sapiens
  misc_feature (1)..(10): Table A2; Target 5713; WT1; ENSG00000184937; HLA-A*29:02;
DFAPPGASAY

SEQ ID NO: 108556 - protein, 10 aa, Homo sapiens
  misc_feature (1)..(10): Table A2; Target 5714; WT1; ENSG00000184937; HLA-A*30:02;
DFAPPGASAY

SEQ ID NO: 108557 - protein, 10 aa, Homo sapiens
  misc_feature (1)..(10): Table A2; Target 5715; WT1; ENSG00000184937; HLA-C*14:02;
DFAPPGASAY

SEQ ID NO: 108558 - protein, 9 aa, Homo sapiens
  misc_feature (1)..(9): Table A2; Target 5716; WT1; ENSG00000184937; HLA-C*14:02;
DFAPPGASA

SEQ ID NO: 108559 - protein, 8 aa, Homo sapiens
  misc_feature (1)..(8): Table A2; Target 5717; WT1; ENSG00000184937; HLA-A*33:01;
DHLKTHTR

SEQ ID NO: 108560 - protein, 9 aa, Homo sapiens
  misc_feature (1)..(9): Table A2; Target 5718; WT1; ENSG00000184937; HLA-B*07:02;
DPMGQQGSL

SEQ ID NO: 108561 - protein, 9 aa, Homo sapiens
  misc_feature (1)..(9): Table A2; Target 5719; WT1; ENSG00000184937; HLA-B*08:01;
DPMGQQGSL

SEQ ID NO: 108562 - protein, 9 aa, Homo sapiens
  misc_feature (1)..(9): Table A2; Target 5720; WT1; ENSG00000184937; HLA-B*35:01;
DPMGQQGSL

SEQ ID NO: 108563 - protein, 9 aa, Homo sapiens
  misc_feature (1)..(9): Table A2; Target 5721; WT1; ENSG00000184937; HLA-B*35:03;
DPMGQQGSL

SEQ ID NO: 108564 - protein, 9 aa, Homo sapiens
  misc_feature (1)..(9): Table A2; Target 5722; WT1; ENSG00000184937; HLA-B*51:01;
DPMGQQGSL

SEQ ID NO: 108565 - protein, 9 aa, Homo sapiens
  misc_feature (1)..(9): Table A2; Target 5723; WT1; ENSG00000184937; HLA-C*07:02;
DPMGQQGSL

SEQ ID NO: 108566 - protein, 9 aa, Homo sapiens
  misc_feature (1)..(9): Table A2; Target 5724; WT1; ENSG00000184937; HLA-A*25:01;
DVRDLNALL

SEQ ID NO: 108567 - protein, 9 aa, Homo sapiens
  misc_feature (1)..(9): Table A2; Target 5725; WT1; ENSG00000184937; HLA-A*26:01;
DVRDLNALL

SEQ ID NO: 108568 - protein, 9 aa, Homo sapiens
  misc_feature (1)..(9): Table A2; Target 5726; WT1; ENSG00000184937; HLA-A*33:01;
DVRDLNALL

SEQ ID NO: 108569 - protein, 8 aa, Homo sapiens
  misc_feature (1)..(8): Table A2; Target 5727; WT1; ENSG00000184937; HLA-B*08:01;
DVRDLNAL

SEQ ID NO: 108570 - protein, 8 aa, Homo sapiens
  misc_feature (1)..(8): Table A2; Target 5728; WT1; ENSG00000184937; HLA-B*51:01;
DVRRVPGV

SEQ ID NO: 108571 - protein, 8 aa, Homo sapiens
  misc_feature (1)..(8): Table A2; Target 5729; WT1; ENSG00000184937; HLA-B*18:01;
EEQCLSAF

SEQ ID NO: 108572 - protein, 10 aa, Homo sapiens
  misc_feature (1)..(10): Table A2; Target 5730; WT1; ENSG00000184937; HLA-A*26:01;
EGQSNHSTGY

SEQ ID NO: 108573 - protein, 10 aa, Homo sapiens
  misc_feature (1)..(10): Table A2; Target 5731; WT1; ENSG00000184937; HLA-A*30:02;
EGQSNHSTGY

SEQ ID NO: 108574 - protein, 10 aa, Homo sapiens
  misc_feature (1)..(10): Table A2; Target 5732; WT1; ENSG00000184937; HLA-B*44:02;
EGQSNHSTGY

SEQ ID NO: 108575 - protein, 10 aa, Homo sapiens
  misc_feature (1)..(10): Table A2; Target 5733; WT1; ENSG00000184937; HLA-B*44:03;
EGQSNHSTGY

SEQ ID NO: 108576 - protein, 10 aa, Homo sapiens
  misc_feature (1)..(10): Table A2; Target 5734; WT1; ENSG00000184937; HLA-C*04:01;
EGQSNHSTGY

SEQ ID NO: 108577 - protein, 10 aa, Homo sapiens
  misc_feature (1)..(10): Table A2; Target 5735; WT1; ENSG00000184937; HLA-C*07:01;
EGQSNHSTGY

SEQ ID NO: 108578 - protein, 11 aa, Homo sapiens
  misc_feature (1)..(11): Table A2; Target 5736; WT1; ENSG00000184937; HLA-A*30:02;
EQQYSVPPPVY

SEQ ID NO: 108579 - protein, 11 aa, Homo sapiens
  misc_feature (1)..(11): Table A2; Target 5737; WT1; ENSG00000184937; HLA-A*01:01;
ESQPAIRNQGY

SEQ ID NO: 108580 - protein, 11 aa, Homo sapiens
  misc_feature (1)..(11): Table A2; Target 5738; WT1; ENSG00000184937; HLA-A*25:01;
ESQPAIRNQGY

SEQ ID NO: 108581 - protein, 11 aa, Homo sapiens
  misc_feature (1)..(11): Table A2; Target 5739; WT1; ENSG00000184937; HLA-A*26:01;
ESQPAIRNQGY

SEQ ID NO: 108582 - protein, 11 aa, Homo sapiens
  misc_feature (1)..(11): Table A2; Target 5740; WT1; ENSG00000184937; HLA-A*30:02;
ESQPAIRNQGY

SEQ ID NO: 108583 - protein, 11 aa, Homo sapiens
  misc_feature (1)..(11): Table A2; Target 5741; WT1; ENSG00000184937; HLA-B*44:02;
ESQPAIRNQGY

SEQ ID NO: 108584 - protein, 9 aa, Homo sapiens
  misc_feature (1)..(9): Table A2; Target 5742; WT1; ENSG00000184937; HLA-A*26:01;
ETSEKRPFM

SEQ ID NO: 108585 - protein, 9 aa, Homo sapiens
  misc_feature (1)..(9): Table A2; Target 5743; WT1; ENSG00000184937; HLA-A*01:01;
FAPPGASAY

SEQ ID NO: 108586 - protein, 9 aa, Homo sapiens
  misc_feature (1)..(9): Table A2; Target 5744; WT1; ENSG00000184937; HLA-A*25:01;
FAPPGASAY

SEQ ID NO: 108587 - protein, 9 aa, Homo sapiens
  misc_feature (1)..(9): Table A2; Target 5745; WT1; ENSG00000184937; HLA-A*26:01;
FAPPGASAY

SEQ ID NO: 108588 - protein, 9 aa, Homo sapiens
  misc_feature (1)..(9): Table A2; Target 5746; WT1; ENSG00000184937; HLA-A*29:02;
FAPPGASAY

SEQ ID NO: 108589 - protein, 9 aa, Homo sapiens
  misc_feature (1)..(9): Table A2; Target 5747; WT1; ENSG00000184937; HLA-A*30:02;
FAPPGASAY

SEQ ID NO: 108590 - protein, 9 aa, Homo sapiens
  misc_feature (1)..(9): Table A2; Target 5748; WT1; ENSG00000184937; HLA-A*32:01;
FAPPGASAY

SEQ ID NO: 108591 - protein, 9 aa, Homo sapiens
  misc_feature (1)..(9): Table A2; Target 5749; WT1; ENSG00000184937; HLA-B*15:01;
FAPPGASAY

SEQ ID NO: 108592 - protein, 9 aa, Homo sapiens
  misc_feature (1)..(9): Table A2; Target 5750; WT1; ENSG00000184937; HLA-B*15:03;
FAPPGASAY

SEQ ID NO: 108593 - protein, 9 aa, Homo sapiens
  misc_feature (1)..(9): Table A2; Target 5751; WT1; ENSG00000184937; HLA-B*35:01;
FAPPGASAY

SEQ ID NO: 108594 - protein, 9 aa, Homo sapiens
  misc_feature (1)..(9): Table A2; Target 5752; WT1; ENSG00000184937; HLA-B*39:01;
FAPPGASAY

SEQ ID NO: 108595 - protein, 9 aa, Homo sapiens
  misc_feature (1)..(9): Table A2; Target 5753; WT1; ENSG00000184937; HLA-B*46:01;
FAPPGASAY

SEQ ID NO: 108596 - protein, 9 aa, Homo sapiens
  misc_feature (1)..(9): Table A2; Target 5754; WT1; ENSG00000184937; HLA-B*51:01;
FAPPGASAY

SEQ ID NO: 108597 - protein, 9 aa, Homo sapiens
  misc_feature (1)..(9): Table A2; Target 5755; WT1; ENSG00000184937; HLA-B*55:01;
FAPPGASAY

SEQ ID NO: 108598 - protein, 9 aa, Homo sapiens
  misc_feature (1)..(9): Table A2; Target 5756; WT1; ENSG00000184937; HLA-B*58:01;
FAPPGASAY

SEQ ID NO: 108599 - protein, 9 aa, Homo sapiens
  misc_feature (1)..(9): Table A2; Target 5757; WT1; ENSG00000184937; HLA-C*01:02;
FAPPGASAY

SEQ ID NO: 108600 - protein, 9 aa, Homo sapiens
  misc_feature (1)..(9): Table A2; Target 5758; WT1; ENSG00000184937; HLA-C*02:02;
FAPPGASAY

SEQ ID NO: 108601 - protein, 9 aa, Homo sapiens
  misc_feature (1)..(9): Table A2; Target 5759; WT1; ENSG00000184937; HLA-C*03:03;
FAPPGASAY

SEQ ID NO: 108602 - protein, 9 aa, Homo sapiens
  misc_feature (1)..(9): Table A2; Target 5760; WT1; ENSG00000184937; HLA-C*03:04;
FAPPGASAY

SEQ ID NO: 108603 - protein, 9 aa, Homo sapiens
  misc_feature (1)..(9): Table A2; Target 5761; WT1; ENSG00000184937; HLA-C*05:01;
FAPPGASAY

SEQ ID NO: 108604 - protein, 9 aa, Homo sapiens
  misc_feature (1)..(9): Table A2; Target 5762; WT1; ENSG00000184937; HLA-C*07:04;
FAPPGASAY

SEQ ID NO: 108605 - protein, 9 aa, Homo sapiens
  misc_feature (1)..(9): Table A2; Target 5763; WT1; ENSG00000184937; HLA-C*12:03;
FAPPGASAY

SEQ ID NO: 108606 - protein, 9 aa, Homo sapiens
  misc_feature (1)..(9): Table A2; Target 5764; WT1; ENSG00000184937; HLA-C*14:02;
FAPPGASAY

SEQ ID NO: 108607 - protein, 9 aa, Homo sapiens
  misc_feature (1)..(9): Table A2; Target 5765; WT1; ENSG00000184937; HLA-C*16:01;
FAPPGASAY

SEQ ID NO: 108608 - protein, 9 aa, Homo sapiens
  misc_feature (1)..(9): Table A2; Target 5766; WT1; ENSG00000184937; HLA-C*16:02;
FAPPGASAY

SEQ ID NO: 108609 - protein, 9 aa, Homo sapiens
  misc_feature (1)..(9): Table A2; Target 5767; WT1; ENSG00000184937; HLA-C*16:04;
FAPPGASAY

SEQ ID NO: 108610 - protein, 9 aa, Homo sapiens
  misc_feature (1)..(9): Table A2; Target 5768; WT1; ENSG00000184937; HLA-A*02:01;
FGPPPPSQA

SEQ ID NO: 108611 - protein, 9 aa, Homo sapiens
  misc_feature (1)..(9): Table A2; Target 5769; WT1; ENSG00000184937; HLA-A*02:07;
FGPPPPSQA

SEQ ID NO: 108612 - protein, 11 aa, Homo sapiens
  misc_feature (1)..(11): Table A2; Target 5770; WT1; ENSG00000184937; HLA-B*35:03;
FPNAPYLPSCL

SEQ ID NO: 108613 - protein, 10 aa, Homo sapiens
  misc_feature (1)..(10): Table A2; Target 5771; WT1; ENSG00000184937; HLA-B*54:01;
FPNAPYLPSC

SEQ ID NO: 108614 - protein, 10 aa, Homo sapiens
  misc_feature (1)..(10): Table A2; Target 5772; WT1; ENSG00000184937; HLA-B*56:01;
FPNAPYLPSC

SEQ ID NO: 108615 - protein, 9 aa, Homo sapiens
  misc_feature (1)..(9): Table A2; Target 5773; WT1; ENSG00000184937; HLA-B*54:01;
FPNAPYLPS

SEQ ID NO: 108616 - protein, 8 aa, Homo sapiens
  misc_feature (1)..(8): Table A2; Target 5774; WT1; ENSG00000184937; HLA-B*54:01;
FPNAPYLP

SEQ ID NO: 108617 - protein, 10 aa, Homo sapiens
  misc_feature (1)..(10): Table A2; Target 5775; WT1; ENSG00000184937; HLA-A*01:01;
FTGTAGACRY

SEQ ID NO: 108618 - protein, 10 aa, Homo sapiens
  misc_feature (1)..(10): Table A2; Target 5776; WT1; ENSG00000184937; HLA-A*29:02;
FTGTAGACRY

SEQ ID NO: 108619 - protein, 10 aa, Homo sapiens
  misc_feature (1)..(10): Table A2; Target 5777; WT1; ENSG00000184937; HLA-A*30:02;
FTGTAGACRY

SEQ ID NO: 108620 - protein, 9 aa, Homo sapiens
  misc_feature (1)..(9): Table A2; Target 5778; WT1; ENSG00000184937; HLA-A*68:01;
FTGTAGACR

SEQ ID NO: 108621 - protein, 9 aa, Homo sapiens
  misc_feature (1)..(9): Table A2; Target 5779; WT1; ENSG00000184937; HLA-C*07:06;
FTGTAGACR

SEQ ID NO: 108622 - protein, 8 aa, Homo sapiens
  misc_feature (1)..(8): Table A2; Target 5780; WT1; ENSG00000184937; HLA-C*12:03;
FTGTAGAC

SEQ ID NO: 108623 - protein, 9 aa, Homo sapiens
  misc_feature (1)..(9): Table A2; Target 5781; WT1; ENSG00000184937; HLA-A*25:01;
FTVHFSGQF

SEQ ID NO: 108624 - protein, 9 aa, Homo sapiens
  misc_feature (1)..(9): Table A2; Target 5782; WT1; ENSG00000184937; HLA-A*26:01;
FTVHFSGQF

SEQ ID NO: 108625 - protein, 9 aa, Homo sapiens
  misc_feature (1)..(9): Table A2; Target 5783; WT1; ENSG00000184937; HLA-A*29:02;
FTVHFSGQF

SEQ ID NO: 108626 - protein, 9 aa, Homo sapiens
  misc_feature (1)..(9): Table A2; Target 5784; WT1; ENSG00000184937; HLA-B*46:01;
FTVHFSGQF

SEQ ID NO: 108627 - protein, 9 aa, Homo sapiens
  misc_feature (1)..(9): Table A2; Target 5785; WT1; ENSG00000184937; HLA-B*57:01;
FTVHFSGQF

SEQ ID NO: 108628 - protein, 9 aa, Homo sapiens
  misc_feature (1)..(9): Table A2; Target 5786; WT1; ENSG00000184937; HLA-C*02:02;
FTVHFSGQF

SEQ ID NO: 108629 - protein, 9 aa, Homo sapiens
  misc_feature (1)..(9): Table A2; Target 5787; WT1; ENSG00000184937; HLA-C*03:03;
GAAQWAPVL

SEQ ID NO: 108630 - protein, 9 aa, Homo sapiens
  misc_feature (1)..(9): Table A2; Target 5788; WT1; ENSG00000184937; HLA-C*03:04;
GAAQWAPVL

SEQ ID NO: 108631 - protein, 9 aa, Homo sapiens
  misc_feature (1)..(9): Table A2; Target 5789; WT1; ENSG00000184937; HLA-B*54:01;
GATLKGVAA

SEQ ID NO: 108632 - protein, 9 aa, Homo sapiens
  misc_feature (1)..(9): Table A2; Target 5790; WT1; ENSG00000184937; HLA-B*56:01;
GATLKGVAA

SEQ ID NO: 108633 - protein, 9 aa, Homo sapiens
  misc_feature (1)..(9): Table A2; Target 5791; WT1; ENSG00000184937; HLA-C*03:04;
GATLKGVAA

SEQ ID NO: 108634 - protein, 9 aa, Homo sapiens
  misc_feature (1)..(9): Table A2; Target 5792; WT1; ENSG00000184937; HLA-C*16:01;
GATLKGVAA

SEQ ID NO: 108635 - protein, 8 aa, Homo sapiens
  misc_feature (1)..(8): Table A2; Target 5793; WT1; ENSG00000184937; HLA-C*16:01;
GATLKGVA

SEQ ID NO: 108636 - protein, 9 aa, Homo sapiens
  misc_feature (1)..(9): Table A2; Target 5794; WT1; ENSG00000184937; HLA-A*30:01;
GEKPYQCDF

SEQ ID NO: 108637 - protein, 9 aa, Homo sapiens
  misc_feature (1)..(9): Table A2; Target 5795; WT1; ENSG00000184937; HLA-B*37:01;
GEKPYQCDF

SEQ ID NO: 108638 - protein, 9 aa, Homo sapiens
  misc_feature (1)..(9): Table A2; Target 5796; WT1; ENSG00000184937; HLA-B*44:02;
GEKPYQCDF

SEQ ID NO: 108639 - protein, 9 aa, Homo sapiens
  misc_feature (1)..(9): Table A2; Target 5797; WT1; ENSG00000184937; HLA-B*44:03;
GEKPYQCDF

SEQ ID NO: 108640 - protein, 9 aa, Homo sapiens
  misc_feature (1)..(9): Table A2; Target 5798; WT1; ENSG00000184937; HLA-C*16:04;
GEKPYQCDF

SEQ ID NO: 108641 - protein, 9 aa, Homo sapiens
  misc_feature (1)..(9): Table A2; Target 5799; WT1; ENSG00000184937; HLA-B*56:01;
GPAPPPAPP

SEQ ID NO: 108642 - protein, 11 aa, Homo sapiens
  misc_feature (1)..(11): Table A2; Target 5800; WT1; ENSG00000184937; HLA-B*54:01;
GPFGPPPPSQA

SEQ ID NO: 108643 - protein, 11 aa, Homo sapiens
  misc_feature (1)..(11): Table A2; Target 5801; WT1; ENSG00000184937; HLA-B*55:01;
GPFGPPPPSQA

SEQ ID NO: 108644 - protein, 11 aa, Homo sapiens
  misc_feature (1)..(11): Table A2; Target 5802; WT1; ENSG00000184937; HLA-B*56:01;
GPFGPPPPSQA

SEQ ID NO: 108645 - protein, 10 aa, Homo sapiens
  misc_feature (1)..(10): Table A2; Target 5803; WT1; ENSG00000184937; HLA-B*54:01;
GPFGPPPPSQ

SEQ ID NO: 108646 - protein, 9 aa, Homo sapiens
  misc_feature (1)..(9): Table A2; Target 5804; WT1; ENSG00000184937; HLA-B*54:01;
GPFGPPPPS

SEQ ID NO: 108647 - protein, 9 aa, Homo sapiens
  misc_feature (1)..(9): Table A2; Target 5805; WT1; ENSG00000184937; HLA-B*56:01;
GPFGPPPPS

SEQ ID NO: 108648 - protein, 8 aa, Homo sapiens
  misc_feature (1)..(8): Table A2; Target 5806; WT1; ENSG00000184937; HLA-B*56:01;
GPFGPPPP

SEQ ID NO: 108649 - protein, 11 aa, Homo sapiens
  misc_feature (1)..(11): Table A2; Target 5807; WT1; ENSG00000184937; HLA-A*30:02;
GQARMFPNAPY

SEQ ID NO: 108650 - protein, 11 aa, Homo sapiens
  misc_feature (1)..(11): Table A2; Target 5808; WT1; ENSG00000184937; HLA-B*15:01;
GQARMFPNAPY

SEQ ID NO: 108651 - protein, 11 aa, Homo sapiens
  misc_feature (1)..(11): Table A2; Target 5809; WT1; ENSG00000184937; HLA-A*31:01;
GQFTGTAGACR

SEQ ID NO: 108652 - protein, 11 aa, Homo sapiens
  misc_feature (1)..(11): Table A2; Target 5810; WT1; ENSG00000184937; HLA-B*13:02;
GQFTGTAGACR

SEQ ID NO: 108653 - protein, 11 aa, Homo sapiens
  misc_feature (1)..(11): Table A2; Target 5811; WT1; ENSG00000184937; HLA-B*27:05;
GQFTGTAGACR

SEQ ID NO: 108654 - protein, 11 aa, Homo sapiens
  misc_feature (1)..(11): Table A2; Target 5812; WT1; ENSG00000184937; HLA-C*07:06;
GQFTGTAGACR

SEQ ID NO: 108655 - protein, 10 aa, Homo sapiens
  misc_feature (1)..(10): Table A2; Target 5813; WT1; ENSG00000184937; HLA-B*13:02;
GQFTGTAGAC

SEQ ID NO: 108656 - protein, 10 aa, Homo sapiens
  misc_feature (1)..(10): Table A2; Target 5814; WT1; ENSG00000184937; HLA-B*15:01;
GQFTGTAGAC

SEQ ID NO: 108657 - protein, 10 aa, Homo sapiens
  misc_feature (1)..(10): Table A2; Target 5815; WT1; ENSG00000184937; HLA-B*15:03;
GQFTGTAGAC

SEQ ID NO: 108658 - protein, 10 aa, Homo sapiens
  misc_feature (1)..(10): Table A2; Target 5816; WT1; ENSG00000184937; HLA-B*27:05;
GQFTGTAGAC

SEQ ID NO: 108659 - protein, 10 aa, Homo sapiens
  misc_feature (1)..(10): Table A2; Target 5817; WT1; ENSG00000184937; HLA-C*16:04;
GQFTGTAGAC

SEQ ID NO: 108660 - protein, 9 aa, Homo sapiens
  misc_feature (1)..(9): Table A2; Target 5818; WT1; ENSG00000184937; HLA-A*02:01;
GQFTGTAGA

SEQ ID NO: 108661 - protein, 9 aa, Homo sapiens
  misc_feature (1)..(9): Table A2; Target 5819; WT1; ENSG00000184937; HLA-A*02:03;
GQFTGTAGA

SEQ ID NO: 108662 - protein, 9 aa, Homo sapiens
  misc_feature (1)..(9): Table A2; Target 5820; WT1; ENSG00000184937; HLA-A*32:01;
GQFTGTAGA

SEQ ID NO: 108663 - protein, 9 aa, Homo sapiens
  misc_feature (1)..(9): Table A2; Target 5821; WT1; ENSG00000184937; HLA-B*13:02;
GQFTGTAGA

SEQ ID NO: 108664 - protein, 9 aa, Homo sapiens
  misc_feature (1)..(9): Table A2; Target 5822; WT1; ENSG00000184937; HLA-B*15:01;
GQFTGTAGA

SEQ ID NO: 108665 - protein, 9 aa, Homo sapiens
  misc_feature (1)..(9): Table A2; Target 5823; WT1; ENSG00000184937; HLA-B*15:03;
GQFTGTAGA

SEQ ID NO: 108666 - protein, 9 aa, Homo sapiens
  misc_feature (1)..(9): Table A2; Target 5824; WT1; ENSG00000184937; HLA-B*27:05;
GQFTGTAGA

SEQ ID NO: 108667 - protein, 11 aa, Homo sapiens
  misc_feature (1)..(11): Table A2; Target 5825; WT1; ENSG00000184937; HLA-A*30:02;
GQQGSLGEQQY

SEQ ID NO: 108668 - protein, 11 aa, Homo sapiens
  misc_feature (1)..(11): Table A2; Target 5826; WT1; ENSG00000184937; HLA-B*15:01;
GQQGSLGEQQY

SEQ ID NO: 108669 - protein, 11 aa, Homo sapiens
  misc_feature (1)..(11): Table A2; Target 5827; WT1; ENSG00000184937; HLA-B*15:03;
GQQGSLGEQQY

SEQ ID NO: 108670 - protein, 11 aa, Homo sapiens
  misc_feature (1)..(11): Table A2; Target 5828; WT1; ENSG00000184937; HLA-B*27:05;
GQQGSLGEQQY

SEQ ID NO: 108671 - protein, 11 aa, Homo sapiens
  misc_feature (1)..(11): Table A2; Target 5829; WT1; ENSG00000184937; HLA-B*39:01;
GQQGSLGEQQY

SEQ ID NO: 108672 - protein, 11 aa, Homo sapiens
  misc_feature (1)..(11): Table A2; Target 5830; WT1; ENSG00000184937; HLA-C*07:04;
GQQGSLGEQQY

SEQ ID NO: 108673 - protein, 11 aa, Homo sapiens
  misc_feature (1)..(11): Table A2; Target 5831; WT1; ENSG00000184937; HLA-C*16:04;
GQQGSLGEQQY

SEQ ID NO: 108674 - protein, 9 aa, Homo sapiens
  misc_feature (1)..(9): Table A2; Target 5832; WT1; ENSG00000184937; HLA-A*26:01;
GQSNHSTGY

SEQ ID NO: 108675 - protein, 9 aa, Homo sapiens
  misc_feature (1)..(9): Table A2; Target 5833; WT1; ENSG00000184937; HLA-A*29:02;
GQSNHSTGY

SEQ ID NO: 108676 - protein, 9 aa, Homo sapiens
  misc_feature (1)..(9): Table A2; Target 5834; WT1; ENSG00000184937; HLA-A*30:02;
GQSNHSTGY

SEQ ID NO: 108677 - protein, 9 aa, Homo sapiens
  misc_feature (1)..(9): Table A2; Target 5835; WT1; ENSG00000184937; HLA-A*32:01;
GQSNHSTGY

SEQ ID NO: 108678 - protein, 9 aa, Homo sapiens
  misc_feature (1)..(9): Table A2; Target 5836; WT1; ENSG00000184937; HLA-B*13:02;
GQSNHSTGY

SEQ ID NO: 108679 - protein, 9 aa, Homo sapiens
  misc_feature (1)..(9): Table A2; Target 5837; WT1; ENSG00000184937; HLA-B*15:01;
GQSNHSTGY

SEQ ID NO: 108680 - protein, 9 aa, Homo sapiens
  misc_feature (1)..(9): Table A2; Target 5838; WT1; ENSG00000184937; HLA-B*15:03;
GQSNHSTGY

SEQ ID NO: 108681 - protein, 9 aa, Homo sapiens
  misc_feature (1)..(9): Table A2; Target 5839; WT1; ENSG00000184937; HLA-B*27:02;
GQSNHSTGY

SEQ ID NO: 108682 - protein, 9 aa, Homo sapiens
  misc_feature (1)..(9): Table A2; Target 5840; WT1; ENSG00000184937; HLA-B*27:05;
GQSNHSTGY

SEQ ID NO: 108683 - protein, 9 aa, Homo sapiens
  misc_feature (1)..(9): Table A2; Target 5841; WT1; ENSG00000184937; HLA-B*39:01;
GQSNHSTGY

SEQ ID NO: 108684 - protein, 9 aa, Homo sapiens
  misc_feature (1)..(9): Table A2; Target 5842; WT1; ENSG00000184937; HLA-B*44:03;
GQSNHSTGY

SEQ ID NO: 108685 - protein, 9 aa, Homo sapiens
  misc_feature (1)..(9): Table A2; Target 5843; WT1; ENSG00000184937; HLA-B*46:01;
GQSNHSTGY

SEQ ID NO: 108686 - protein, 9 aa, Homo sapiens
  misc_feature (1)..(9): Table A2; Target 5844; WT1; ENSG00000184937; HLA-C*02:02;
GQSNHSTGY

SEQ ID NO: 108687 - protein, 9 aa, Homo sapiens
  misc_feature (1)..(9): Table A2; Target 5845; WT1; ENSG00000184937; HLA-C*07:04;
GQSNHSTGY

SEQ ID NO: 108688 - protein, 9 aa, Homo sapiens
  misc_feature (1)..(9): Table A2; Target 5846; WT1; ENSG00000184937; HLA-C*16:04;
GQSNHSTGY

SEQ ID NO: 108689 - protein, 10 aa, Homo sapiens
  misc_feature (1)..(10): Table A2; Target 5847; WT1; ENSG00000184937; HLA-A*11:01;
GSLGGPAPPP

SEQ ID NO: 108690 - protein, 10 aa, Homo sapiens
  misc_feature (1)..(10): Table A2; Target 5848; WT1; ENSG00000184937; HLA-C*06:02;
GSLGGPAPPP

SEQ ID NO: 108691 - protein, 10 aa, Homo sapiens
  misc_feature (1)..(10): Table A2; Target 5849; WT1; ENSG00000184937; HLA-C*07:02;
GSLGGPAPPP

SEQ ID NO: 108692 - protein, 11 aa, Homo sapiens
  misc_feature (1)..(11): Table A2; Target 5850; WT1; ENSG00000184937; HLA-A*30:02;
GSQALLLRTPY

SEQ ID NO: 108693 - protein, 8 aa, Homo sapiens
  misc_feature (1)..(8): Table A2; Target 5851; WT1; ENSG00000184937; HLA-A*32:01;
GSSSSVKW

SEQ ID NO: 108694 - protein, 8 aa, Homo sapiens
  misc_feature (1)..(8): Table A2; Target 5852; WT1; ENSG00000184937; HLA-B*57:01;
GSSSSVKW

SEQ ID NO: 108695 - protein, 8 aa, Homo sapiens
  misc_feature (1)..(8): Table A2; Target 5853; WT1; ENSG00000184937; HLA-B*58:01;
GSSSSVKW

SEQ ID NO: 108696 - protein, 8 aa, Homo sapiens
  misc_feature (1)..(8): Table A2; Target 5854; WT1; ENSG00000184937; HLA-A*30:02;
GTAGACRY

SEQ ID NO: 108697 - protein, 11 aa, Homo sapiens
  misc_feature (1)..(11): Table A2; Target 5855; WT1; ENSG00000184937; HLA-A*03:01;
GVAAGSSSSVK

SEQ ID NO: 108698 - protein, 11 aa, Homo sapiens
  misc_feature (1)..(11): Table A2; Target 5856; WT1; ENSG00000184937; HLA-A*03:02;
GVAAGSSSSVK

SEQ ID NO: 108699 - protein, 11 aa, Homo sapiens
  misc_feature (1)..(11): Table A2; Target 5857; WT1; ENSG00000184937; HLA-A*11:01;
GVAAGSSSSVK

SEQ ID NO: 108700 - protein, 10 aa, Homo sapiens
  misc_feature (1)..(10): Table A2; Target 5858; WT1; ENSG00000184937; HLA-A*02:03;
GVAAGSSSSV

SEQ ID NO: 108701 - protein, 10 aa, Homo sapiens
  misc_feature (1)..(10): Table A2; Target 5859; WT1; ENSG00000184937; HLA-B*13:02;
GVAAGSSSSV

SEQ ID NO: 108702 - protein, 10 aa, Homo sapiens
  misc_feature (1)..(10): Table A2; Target 5860; WT1; ENSG00000184937; HLA-B*56:01;
GVAPTLVRSA

SEQ ID NO: 108703 - protein, 9 aa, Homo sapiens
  misc_feature (1)..(9): Table A2; Target 5861; WT1; ENSG00000184937; HLA-A*02:01;
GVFRGIQDV

SEQ ID NO: 108704 - protein, 9 aa, Homo sapiens
  misc_feature (1)..(9): Table A2; Target 5862; WT1; ENSG00000184937; HLA-A*02:03;
GVFRGIQDV

SEQ ID NO: 108705 - protein, 9 aa, Homo sapiens
  misc_feature (1)..(9): Table A2; Target 5863; WT1; ENSG00000184937; HLA-A*02:04;
GVFRGIQDV

SEQ ID NO: 108706 - protein, 9 aa, Homo sapiens
  misc_feature (1)..(9): Table A2; Target 5864; WT1; ENSG00000184937; HLA-B*13:02;
GVFRGIQDV

SEQ ID NO: 108707 - protein, 10 aa, Homo sapiens
  misc_feature (1)..(10): Table A2; Target 5865; WT1; ENSG00000184937; HLA-A*25:01;
HAAQFPNHSF

SEQ ID NO: 108708 - protein, 10 aa, Homo sapiens
  misc_feature (1)..(10): Table A2; Target 5866; WT1; ENSG00000184937; HLA-A*26:01;
HAAQFPNHSF

SEQ ID NO: 108709 - protein, 10 aa, Homo sapiens
  misc_feature (1)..(10): Table A2; Target 5867; WT1; ENSG00000184937; HLA-A*32:01;
HAAQFPNHSF

SEQ ID NO: 108710 - protein, 10 aa, Homo sapiens
  misc_feature (1)..(10): Table A2; Target 5868; WT1; ENSG00000184937; HLA-A*33:01;
HAAQFPNHSF

SEQ ID NO: 108711 - protein, 10 aa, Homo sapiens
  misc_feature (1)..(10): Table A2; Target 5869; WT1; ENSG00000184937; HLA-A*68:02;
HAAQFPNHSF

SEQ ID NO: 108712 - protein, 10 aa, Homo sapiens
  misc_feature (1)..(10): Table A2; Target 5870; WT1; ENSG00000184937; HLA-B*35:01;
HAAQFPNHSF

SEQ ID NO: 108713 - protein, 10 aa, Homo sapiens
  misc_feature (1)..(10): Table A2; Target 5871; WT1; ENSG00000184937; HLA-B*35:03;
HAAQFPNHSF

SEQ ID NO: 108714 - protein, 10 aa, Homo sapiens
  misc_feature (1)..(10): Table A2; Target 5872; WT1; ENSG00000184937; HLA-B*46:01;
HAAQFPNHSF

SEQ ID NO: 108715 - protein, 10 aa, Homo sapiens
  misc_feature (1)..(10): Table A2; Target 5873; WT1; ENSG00000184937; HLA-B*54:01;
HAAQFPNHSF

SEQ ID NO: 108716 - protein, 10 aa, Homo sapiens
  misc_feature (1)..(10): Table A2; Target 5874; WT1; ENSG00000184937; HLA-B*57:01;
HAAQFPNHSF

SEQ ID NO: 108717 - protein, 10 aa, Homo sapiens
  misc_feature (1)..(10): Table A2; Target 5875; WT1; ENSG00000184937; HLA-B*58:01;
HAAQFPNHSF

SEQ ID NO: 108718 - protein, 10 aa, Homo sapiens
  misc_feature (1)..(10): Table A2; Target 5876; WT1; ENSG00000184937; HLA-C*02:02;
HAAQFPNHSF

SEQ ID NO: 108719 - protein, 10 aa, Homo sapiens
  misc_feature (1)..(10): Table A2; Target 5877; WT1; ENSG00000184937; HLA-C*03:03;
HAAQFPNHSF

SEQ ID NO: 108720 - protein, 10 aa, Homo sapiens
  misc_feature (1)..(10): Table A2; Target 5878; WT1; ENSG00000184937; HLA-C*03:04;
HAAQFPNHSF

SEQ ID NO: 108721 - protein, 10 aa, Homo sapiens
  misc_feature (1)..(10): Table A2; Target 5879; WT1; ENSG00000184937; HLA-C*07:06;
HAAQFPNHSF

SEQ ID NO: 108722 - protein, 10 aa, Homo sapiens
  misc_feature (1)..(10): Table A2; Target 5880; WT1; ENSG00000184937; HLA-C*16:04;
HAAQFPNHSF

SEQ ID NO: 108723 - protein, 11 aa, Homo sapiens
  misc_feature (1)..(11): Table A2; Target 5881; WT1; ENSG00000184937; HLA-A*30:01;
HEDPMGQQGSL

SEQ ID NO: 108724 - protein, 11 aa, Homo sapiens
  misc_feature (1)..(11): Table A2; Target 5882; WT1; ENSG00000184937; HLA-B*39:01;
HEDPMGQQGSL

SEQ ID NO: 108725 - protein, 11 aa, Homo sapiens
  misc_feature (1)..(11): Table A2; Target 5883; WT1; ENSG00000184937; HLA-B*40:01;
HEDPMGQQGSL

SEQ ID NO: 108726 - protein, 11 aa, Homo sapiens
  misc_feature (1)..(11): Table A2; Target 5884; WT1; ENSG00000184937; HLA-B*49:01;
HEDPMGQQGSL

SEQ ID NO: 108727 - protein, 9 aa, Homo sapiens
  misc_feature (1)..(9): Table A2; Target 5885; WT1; ENSG00000184937; HLA-B*49:01;
HEDPMGQQG

SEQ ID NO: 108728 - protein, 9 aa, Homo sapiens
  misc_feature (1)..(9): Table A2; Target 5886; WT1; ENSG00000184937; HLA-B*18:01;
HEEQCLSAF

SEQ ID NO: 108729 - protein, 11 aa, Homo sapiens
  misc_feature (1)..(11): Table A2; Target 5887; WT1; ENSG00000184937; HLA-B*38:01;
HHAAQFPNHSF

SEQ ID NO: 108730 - protein, 8 aa, Homo sapiens
  misc_feature (1)..(8): Table A2; Target 5888; WT1; ENSG00000184937; HLA-B*15:03;
HQRNMTKL

SEQ ID NO: 108731 - protein, 10 aa, Homo sapiens
  misc_feature (1)..(10): Table A2; Target 5889; WT1; ENSG00000184937; HLA-B*57:01;
HSFIKQEPSW

SEQ ID NO: 108732 - protein, 10 aa, Homo sapiens
  misc_feature (1)..(10): Table A2; Target 5890; WT1; ENSG00000184937; HLA-A*25:01;
HTPSHHAAQF

SEQ ID NO: 108733 - protein, 10 aa, Homo sapiens
  misc_feature (1)..(10): Table A2; Target 5891; WT1; ENSG00000184937; HLA-A*26:01;
HTPSHHAAQF

SEQ ID NO: 108734 - protein, 9 aa, Homo sapiens
  misc_feature (1)..(9): Table A2; Target 5892; WT1; ENSG00000184937; HLA-A*68:02;
HTTPILCGA

SEQ ID NO: 108735 - protein, 11 aa, Homo sapiens
  misc_feature (1)..(11): Table A2; Target 5893; WT1; ENSG00000184937; HLA-B*27:02;
IRNQGYSTVTF

SEQ ID NO: 108736 - protein, 11 aa, Homo sapiens
  misc_feature (1)..(11): Table A2; Target 5894; WT1; ENSG00000184937; HLA-C*16:04;
IRNQGYSTVTF

SEQ ID NO: 108737 - protein, 11 aa, Homo sapiens
  misc_feature (1)..(11): Table A2; Target 5895; WT1; ENSG00000184937; HLA-A*30:02;
LDFAPPGASAY

SEQ ID NO: 108738 - protein, 11 aa, Homo sapiens
  misc_feature (1)..(11): Table A2; Target 5896; WT1; ENSG00000184937; HLA-B*18:01;
LDFAPPGASAY

SEQ ID NO: 108739 - protein, 11 aa, Homo sapiens
  misc_feature (1)..(11): Table A2; Target 5897; WT1; ENSG00000184937; HLA-C*16:04;
LDFAPPGASAY

SEQ ID NO: 108740 - protein, 10 aa, Homo sapiens
  misc_feature (1)..(10): Table A2; Target 5898; WT1; ENSG00000184937; HLA-B*54:01;
LGATLKGVAA

SEQ ID NO: 108741 - protein, 9 aa, Homo sapiens
  misc_feature (1)..(9): Table A2; Target 5899; WT1; ENSG00000184937; HLA-C*03:04;
LGGGGGCAL

SEQ ID NO: 108742 - protein, 10 aa, Homo sapiens
  misc_feature (1)..(10): Table A2; Target 5900; WT1; ENSG00000184937; HLA-A*02:07;
LLPAVPSLGG

SEQ ID NO: 108743 - protein, 8 aa, Homo sapiens
  misc_feature (1)..(8): Table A2; Target 5901; WT1; ENSG00000184937; HLA-A*02:07;
LLPAVPSL

SEQ ID NO: 108744 - protein, 8 aa, Homo sapiens
  misc_feature (1)..(8): Table A2; Target 5902; WT1; ENSG00000184937; HLA-A*24:02;
LLPAVPSL

SEQ ID NO: 108745 - protein, 8 aa, Homo sapiens
  misc_feature (1)..(8): Table A2; Target 5903; WT1; ENSG00000184937; HLA-B*51:01;
LLPAVPSL

SEQ ID NO: 108746 - protein, 8 aa, Homo sapiens
  misc_feature (1)..(8): Table A2; Target 5904; WT1; ENSG00000184937; HLA-C*01:02;
LLPAVPSL

SEQ ID NO: 108747 - protein, 9 aa, Homo sapiens
  misc_feature (1)..(9): Table A2; Target 5905; WT1; ENSG00000184937; HLA-B*51:01;
LPAVPSLGG

SEQ ID NO: 108748 - protein, 9 aa, Homo sapiens
  misc_feature (1)..(9): Table A2; Target 5906; WT1; ENSG00000184937; HLA-B*54:01;
LPAVPSLGG

SEQ ID NO: 108749 - protein, 9 aa, Homo sapiens
  misc_feature (1)..(9): Table A2; Target 5907; WT1; ENSG00000184937; HLA-B*56:01;
LPAVPSLGG

SEQ ID NO: 108750 - protein, 9 aa, Homo sapiens
  misc_feature (1)..(9): Table A2; Target 5908; WT1; ENSG00000184937; HLA-A*25:01;
LPVSGAAQW

SEQ ID NO: 108751 - protein, 9 aa, Homo sapiens
  misc_feature (1)..(9): Table A2; Target 5909; WT1; ENSG00000184937; HLA-B*35:01;
LPVSGAAQW

SEQ ID NO: 108752 - protein, 9 aa, Homo sapiens
  misc_feature (1)..(9): Table A2; Target 5910; WT1; ENSG00000184937; HLA-B*35:03;
LPVSGAAQW

SEQ ID NO: 108753 - protein, 9 aa, Homo sapiens
  misc_feature (1)..(9): Table A2; Target 5911; WT1; ENSG00000184937; HLA-B*51:01;
LPVSGAAQW

SEQ ID NO: 108754 - protein, 9 aa, Homo sapiens
  misc_feature (1)..(9): Table A2; Target 5912; WT1; ENSG00000184937; HLA-B*56:01;
LPVSGAAQW

SEQ ID NO: 108755 - protein, 9 aa, Homo sapiens
  misc_feature (1)..(9): Table A2; Target 5913; WT1; ENSG00000184937; HLA-A*33:01;
LSHLQMHSR

SEQ ID NO: 108756 - protein, 11 aa, Homo sapiens
  misc_feature (1)..(11): Table A2; Target 5914; WT1; ENSG00000184937; HLA-A*03:01;
LVRSASETSEK

SEQ ID NO: 108757 - protein, 8 aa, Homo sapiens
  misc_feature (1)..(8): Table A2; Target 5915; WT1; ENSG00000184937; HLA-C*14:02;
LYQMTSQL

SEQ ID NO: 108758 - protein, 8 aa, Homo sapiens
  misc_feature (1)..(8): Table A2; Target 5916; WT1; ENSG00000184937; HLA-C*16:01;
MGSDVRDL

SEQ ID NO: 108759 - protein, 9 aa, Homo sapiens
  misc_feature (1)..(9): Table A2; Target 5917; WT1; ENSG00000184937; HLA-B*38:01;
MHQRNMTKL

SEQ ID NO: 108760 - protein, 8 aa, Homo sapiens
  misc_feature (1)..(8): Table A2; Target 5918; WT1; ENSG00000184937; HLA-B*08:01;
MTKLQLAL

SEQ ID NO: 108761 - protein, 8 aa, Homo sapiens
  misc_feature (1)..(8): Table A2; Target 5919; WT1; ENSG00000184937; HLA-C*03:04;
MTKLQLAL

SEQ ID NO: 108762 - protein, 8 aa, Homo sapiens
  misc_feature (1)..(8): Table A2; Target 5920; WT1; ENSG00000184937; HLA-C*07:01;
MTKLQLAL

SEQ ID NO: 108763 - protein, 10 aa, Homo sapiens
  misc_feature (1)..(10): Table A2; Target 5921; WT1; ENSG00000184937; HLA-A*25:01;
MTSQLECMTW

SEQ ID NO: 108764 - protein, 10 aa, Homo sapiens
  misc_feature (1)..(10): Table A2; Target 5922; WT1; ENSG00000184937; HLA-B*57:01;
MTSQLECMTW

SEQ ID NO: 108765 - protein, 10 aa, Homo sapiens
  misc_feature (1)..(10): Table A2; Target 5923; WT1; ENSG00000184937; HLA-B*58:01;
MTSQLECMTW

SEQ ID NO: 108766 - protein, 9 aa, Homo sapiens
  misc_feature (1)..(9): Table A2; Target 5924; WT1; ENSG00000184937; HLA-C*01:02;
NAPYLPSCL

SEQ ID NO: 108767 - protein, 8 aa, Homo sapiens
  misc_feature (1)..(8): Table A2; Target 5925; WT1; ENSG00000184937; HLA-B*51:01;
NAPYLPSC

SEQ ID NO: 108768 - protein, 9 aa, Homo sapiens
  misc_feature (1)..(9): Table A2; Target 5926; WT1; ENSG00000184937; HLA-A*02:03;
NLGATLKGV

SEQ ID NO: 108769 - protein, 9 aa, Homo sapiens
  misc_feature (1)..(9): Table A2; Target 5927; WT1; ENSG00000184937; HLA-A*02:01;
NLYQMTSQL

SEQ ID NO: 108770 - protein, 9 aa, Homo sapiens
  misc_feature (1)..(9): Table A2; Target 5928; WT1; ENSG00000184937; HLA-A*02:03;
NLYQMTSQL

SEQ ID NO: 108771 - protein, 9 aa, Homo sapiens
  misc_feature (1)..(9): Table A2; Target 5929; WT1; ENSG00000184937; HLA-C*01:02;
NLYQMTSQL

SEQ ID NO: 108772 - protein, 9 aa, Homo sapiens
  misc_feature (1)..(9): Table A2; Target 5930; WT1; ENSG00000184937; HLA-C*14:02;
NLYQMTSQL

SEQ ID NO: 108773 - protein, 9 aa, Homo sapiens
  misc_feature (1)..(9): Table A2; Target 5931; WT1; ENSG00000184937; HLA-B*08:01;
NMTKLQLAL

SEQ ID NO: 108774 - protein, 9 aa, Homo sapiens
  misc_feature (1)..(9): Table A2; Target 5932; WT1; ENSG00000184937; HLA-B*13:02;
NMTKLQLAL

SEQ ID NO: 108775 - protein, 9 aa, Homo sapiens
  misc_feature (1)..(9): Table A2; Target 5933; WT1; ENSG00000184937; HLA-B*15:01;
NQGYSTVTF

SEQ ID NO: 108776 - protein, 9 aa, Homo sapiens
  misc_feature (1)..(9): Table A2; Target 5934; WT1; ENSG00000184937; HLA-B*15:03;
NQGYSTVTF

SEQ ID NO: 108777 - protein, 9 aa, Homo sapiens
  misc_feature (1)..(9): Table A2; Target 5935; WT1; ENSG00000184937; HLA-B*18:01;
NQGYSTVTF

SEQ ID NO: 108778 - protein, 9 aa, Homo sapiens
  misc_feature (1)..(9): Table A2; Target 5936; WT1; ENSG00000184937; HLA-B*38:01;
NQGYSTVTF

SEQ ID NO: 108779 - protein, 9 aa, Homo sapiens
  misc_feature (1)..(9): Table A2; Target 5937; WT1; ENSG00000184937; HLA-B*39:01;
NQGYSTVTF

SEQ ID NO: 108780 - protein, 9 aa, Homo sapiens
  misc_feature (1)..(9): Table A2; Target 5938; WT1; ENSG00000184937; HLA-C*07:04;
NQGYSTVTF

SEQ ID NO: 108781 - protein, 9 aa, Homo sapiens
  misc_feature (1)..(9): Table A2; Target 5939; WT1; ENSG00000184937; HLA-C*14:02;
NQGYSTVTF

SEQ ID NO: 108782 - protein, 10 aa, Homo sapiens
  misc_feature (1)..(10): Table A2; Target 5940; WT1; ENSG00000184937; HLA-A*11:01;
NQMNLGATLK

SEQ ID NO: 108783 - protein, 9 aa, Homo sapiens
  misc_feature (1)..(9): Table A2; Target 5941; WT1; ENSG00000184937; HLA-A*23:01;
NQMNLGATL

SEQ ID NO: 108784 - protein, 9 aa, Homo sapiens
  misc_feature (1)..(9): Table A2; Target 5942; WT1; ENSG00000184937; HLA-B*13:02;
NQMNLGATL

SEQ ID NO: 108785 - protein, 9 aa, Homo sapiens
  misc_feature (1)..(9): Table A2; Target 5943; WT1; ENSG00000184937; HLA-B*15:01;
NQMNLGATL

SEQ ID NO: 108786 - protein, 9 aa, Homo sapiens
  misc_feature (1)..(9): Table A2; Target 5944; WT1; ENSG00000184937; HLA-B*15:03;
NQMNLGATL

SEQ ID NO: 108787 - protein, 9 aa, Homo sapiens
  misc_feature (1)..(9): Table A2; Target 5945; WT1; ENSG00000184937; HLA-B*27:05;
NQMNLGATL

SEQ ID NO: 108788 - protein, 9 aa, Homo sapiens
  misc_feature (1)..(9): Table A2; Target 5946; WT1; ENSG00000184937; HLA-B*38:01;
NQMNLGATL

SEQ ID NO: 108789 - protein, 9 aa, Homo sapiens
  misc_feature (1)..(9): Table A2; Target 5947; WT1; ENSG00000184937; HLA-B*39:01;
NQMNLGATL

SEQ ID NO: 108790 - protein, 9 aa, Homo sapiens
  misc_feature (1)..(9): Table A2; Target 5948; WT1; ENSG00000184937; HLA-C*03:03;
NQMNLGATL

SEQ ID NO: 108791 - protein, 9 aa, Homo sapiens
  misc_feature (1)..(9): Table A2; Target 5949; WT1; ENSG00000184937; HLA-C*07:02;
NQMNLGATL

SEQ ID NO: 108792 - protein, 9 aa, Homo sapiens
  misc_feature (1)..(9): Table A2; Target 5950; WT1; ENSG00000184937; HLA-C*07:04;
NQMNLGATL

SEQ ID NO: 108793 - protein, 9 aa, Homo sapiens
  misc_feature (1)..(9): Table A2; Target 5951; WT1; ENSG00000184937; HLA-C*14:02;
NQMNLGATL

SEQ ID NO: 108794 - protein, 9 aa, Homo sapiens
  misc_feature (1)..(9): Table A2; Target 5952; WT1; ENSG00000184937; HLA-C*16:04;
NQMNLGATL

SEQ ID NO: 108795 - protein, 9 aa, Homo sapiens
  misc_feature (1)..(9): Table A2; Target 5953; WT1; ENSG00000184937; HLA-C*04:01;
PPPPPPPPP

SEQ ID NO: 108796 - protein, 9 aa, Homo sapiens
  misc_feature (1)..(9): Table A2; Target 5954; WT1; ENSG00000184937; HLA-A*01:01;
QALLLRTPY

SEQ ID NO: 108797 - protein, 9 aa, Homo sapiens
  misc_feature (1)..(9): Table A2; Target 5955; WT1; ENSG00000184937; HLA-A*29:02;
QALLLRTPY

SEQ ID NO: 108798 - protein, 9 aa, Homo sapiens
  misc_feature (1)..(9): Table A2; Target 5956; WT1; ENSG00000184937; HLA-A*30:02;
QALLLRTPY

SEQ ID NO: 108799 - protein, 9 aa, Homo sapiens
  misc_feature (1)..(9): Table A2; Target 5957; WT1; ENSG00000184937; HLA-B*15:03;
QALLLRTPY

SEQ ID NO: 108800 - protein, 9 aa, Homo sapiens
  misc_feature (1)..(9): Table A2; Target 5958; WT1; ENSG00000184937; HLA-B*35:01;
QALLLRTPY

SEQ ID NO: 108801 - protein, 9 aa, Homo sapiens
  misc_feature (1)..(9): Table A2; Target 5959; WT1; ENSG00000184937; HLA-B*46:01;
QALLLRTPY

SEQ ID NO: 108802 - protein, 9 aa, Homo sapiens
  misc_feature (1)..(9): Table A2; Target 5960; WT1; ENSG00000184937; HLA-B*57:01;
QALLLRTPY

SEQ ID NO: 108803 - protein, 9 aa, Homo sapiens
  misc_feature (1)..(9): Table A2; Target 5961; WT1; ENSG00000184937; HLA-C*02:02;
QALLLRTPY

SEQ ID NO: 108804 - protein, 9 aa, Homo sapiens
  misc_feature (1)..(9): Table A2; Target 5962; WT1; ENSG00000184937; HLA-C*07:01;
QALLLRTPY

SEQ ID NO: 108805 - protein, 9 aa, Homo sapiens
  misc_feature (1)..(9): Table A2; Target 5963; WT1; ENSG00000184937; HLA-C*07:04;
QALLLRTPY

SEQ ID NO: 108806 - protein, 9 aa, Homo sapiens
  misc_feature (1)..(9): Table A2; Target 5964; WT1; ENSG00000184937; HLA-C*16:01;
QALLLRTPY

SEQ ID NO: 108807 - protein, 10 aa, Homo sapiens
  misc_feature (1)..(10): Table A2; Target 5965; WT1; ENSG00000184937; HLA-C*16:01;
QASSGQARMF

SEQ ID NO: 108808 - protein, 10 aa, Homo sapiens
  misc_feature (1)..(10): Table A2; Target 5966; WT1; ENSG00000184937; HLA-C*16:02;
QASSGQARMF

SEQ ID NO: 108809 - protein, 9 aa, Homo sapiens
  misc_feature (1)..(9): Table A2; Target 5967; WT1; ENSG00000184937; HLA-C*16:01;
QASSGQARM

SEQ ID NO: 108810 - protein, 9 aa, Homo sapiens
  misc_feature (1)..(9): Table A2; Target 5968; WT1; ENSG00000184937; HLA-B*37:01;
QDVRRVPGV

SEQ ID NO: 108811 - protein, 11 aa, Homo sapiens
  misc_feature (1)..(11): Table A2; Target 5969; WT1; ENSG00000184937; HLA-A*29:02;
QFTGTAGACRY

SEQ ID NO: 108812 - protein, 8 aa, Homo sapiens
  misc_feature (1)..(8): Table A2; Target 5970; WT1; ENSG00000184937; HLA-B*08:01;
QGYSTVTF

SEQ ID NO: 108813 - protein, 8 aa, Homo sapiens
  misc_feature (1)..(8): Table A2; Target 5971; WT1; ENSG00000184937; HLA-B*15:03;
QGYSTVTF

SEQ ID NO: 108814 - protein, 8 aa, Homo sapiens
  misc_feature (1)..(8): Table A2; Target 5972; WT1; ENSG00000184937; HLA-B*18:01;
QGYSTVTF

SEQ ID NO: 108815 - protein, 8 aa, Homo sapiens
  misc_feature (1)..(8): Table A2; Target 5973; WT1; ENSG00000184937; HLA-B*37:01;
QGYSTVTF

SEQ ID NO: 108816 - protein, 8 aa, Homo sapiens
  misc_feature (1)..(8): Table A2; Target 5974; WT1; ENSG00000184937; HLA-B*46:01;
QGYSTVTF

SEQ ID NO: 108817 - protein, 8 aa, Homo sapiens
  misc_feature (1)..(8): Table A2; Target 5975; WT1; ENSG00000184937; HLA-C*12:03;
QGYSTVTF

SEQ ID NO: 108818 - protein, 9 aa, Homo sapiens
  misc_feature (1)..(9): Table A2; Target 5976; WT1; ENSG00000184937; HLA-A*03:01;
QMNLGATLK

SEQ ID NO: 108819 - protein, 9 aa, Homo sapiens
  misc_feature (1)..(9): Table A2; Target 5977; WT1; ENSG00000184937; HLA-A*03:02;
QMNLGATLK

SEQ ID NO: 108820 - protein, 9 aa, Homo sapiens
  misc_feature (1)..(9): Table A2; Target 5978; WT1; ENSG00000184937; HLA-A*11:01;
QMNLGATLK

SEQ ID NO: 108821 - protein, 8 aa, Homo sapiens
  misc_feature (1)..(8): Table A2; Target 5979; WT1; ENSG00000184937; HLA-B*07:02;
QMNLGATL

SEQ ID NO: 108822 - protein, 8 aa, Homo sapiens
  misc_feature (1)..(8): Table A2; Target 5980; WT1; ENSG00000184937; HLA-B*08:01;
QMNLGATL

SEQ ID NO: 108823 - protein, 8 aa, Homo sapiens
  misc_feature (1)..(8): Table A2; Target 5981; WT1; ENSG00000184937; HLA-C*01:02;
QMNLGATL

SEQ ID NO: 108824 - protein, 8 aa, Homo sapiens
  misc_feature (1)..(8): Table A2; Target 5982; WT1; ENSG00000184937; HLA-C*14:02;
QMNLGATL

SEQ ID NO: 108825 - protein, 9 aa, Homo sapiens
  misc_feature (1)..(9): Table A2; Target 5982; WT1; ENSG00000184937; HLA-B*35:01;
QPAIRNQGY

SEQ ID NO: 108826 - protein, 9 aa, Homo sapiens
  misc_feature (1)..(9): Table A2; Target 5984; WT1; ENSG00000184937; HLA-B*55:01;
QPAIRNQGY

SEQ ID NO: 108827 - protein, 10 aa, Homo sapiens
  misc_feature (1)..(10): Table A2; Target 5985; WT1; ENSG00000184937; HLA-A*30:02;
QQGSLGEQQY

SEQ ID NO: 108828 - protein, 10 aa, Homo sapiens
  misc_feature (1)..(10): Table A2; Target 5986; WT1; ENSG00000184937; HLA-B*15:01;
QQGSLGEQQY

SEQ ID NO: 108829 - protein, 10 aa, Homo sapiens
  misc_feature (1)..(10): Table A2; Target 5987; WT1; ENSG00000184937; HLA-C*07:04;
QQGSLGEQQY

SEQ ID NO: 108830 - protein, 10 aa, Homo sapiens
  misc_feature (1)..(10): Table A2; Target 5988; WT1; ENSG00000184937; HLA-A*30:02;
QQYSVPPPVY

SEQ ID NO: 108831 - protein, 10 aa, Homo sapiens
  misc_feature (1)..(10): Table A2; Target 5989; WT1; ENSG00000184937; HLA-A*32:01;
QQYSVPPPVY

SEQ ID NO: 108832 - protein, 10 aa, Homo sapiens
  misc_feature (1)..(10): Table A2; Target 5990; WT1; ENSG00000184937; HLA-B*15:01;
QQYSVPPPVY

SEQ ID NO: 108833 - protein, 10 aa, Homo sapiens
  misc_feature (1)..(10): Table A2; Target 5991; WT1; ENSG00000184937; HLA-B*15:03;
QQYSVPPPVY

SEQ ID NO: 108834 - protein, 10 aa, Homo sapiens
  misc_feature (1)..(10): Table A2; Target 5992; WT1; ENSG00000184937; HLA-B*39:01;
QQYSVPPPVY

SEQ ID NO: 108835 - protein, 10 aa, Homo sapiens
  misc_feature (1)..(10): Table A2; Target 5993; WT1; ENSG00000184937; HLA-C*16:04;
QQYSVPPPVY

SEQ ID NO: 108836 - protein, 9 aa, Homo sapiens
  misc_feature (1)..(9): Table A2; Target 5994; WT1; ENSG00000184937; HLA-A*02:01;
QQYSVPPPV

SEQ ID NO: 108837 - protein, 9 aa, Homo sapiens
  misc_feature (1)..(9): Table A2; Target 5995; WT1; ENSG00000184937; HLA-A*02:03;
QQYSVPPPV

SEQ ID NO: 108838 - protein, 9 aa, Homo sapiens
  misc_feature (1)..(9): Table A2; Target 5996; WT1; ENSG00000184937; HLA-A*02:07;
QQYSVPPPV

SEQ ID NO: 108839 - protein, 9 aa, Homo sapiens
  misc_feature (1)..(9): Table A2; Target 5997; WT1; ENSG00000184937; HLA-A*30:01;
QQYSVPPPV

SEQ ID NO: 108840 - protein, 9 aa, Homo sapiens
  misc_feature (1)..(9): Table A2; Target 5998; WT1; ENSG00000184937; HLA-A*32:01;
QQYSVPPPV

SEQ ID NO: 108841 - protein, 9 aa, Homo sapiens
  misc_feature (1)..(9): Table A2; Target 5999; WT1; ENSG00000184937; HLA-B*13:02;
QQYSVPPPV

SEQ ID NO: 108842 - protein, 9 aa, Homo sapiens
  misc_feature (1)..(9): Table A2; Target 6000; WT1; ENSG00000184937; HLA-B*37:01;
QQYSVPPPV

SEQ ID NO: 108843 - protein, 9 aa, Homo sapiens
  misc_feature (1)..(9): Table A2; Target 6001; WT1; ENSG00000184937; HLA-B*49:01;
QQYSVPPPV

SEQ ID NO: 108844 - protein, 9 aa, Homo sapiens
  misc_feature (1)..(9): Table A2; Target 6002; WT1; ENSG00000184937; HLA-B*55:01;
QQYSVPPPV

SEQ ID NO: 108845 - protein, 9 aa, Homo sapiens
  misc_feature (1)..(9): Table A2; Target 6003; WT1; ENSG00000184937; HLA-B*56:01;
QQYSVPPPV

SEQ ID NO: 108846 - protein, 9 aa, Homo sapiens
  misc_feature (1)..(9): Table A2; Target 6004; WT1; ENSG00000184937; HLA-C*02:02;
QQYSVPPPV

SEQ ID NO: 108847 - protein, 9 aa, Homo sapiens
  misc_feature (1)..(9): Table A2; Target 6005; WT1; ENSG00000184937; HLA-C*06:02;
QQYSVPPPV

SEQ ID NO: 108848 - protein, 9 aa, Homo sapiens
  misc_feature (1)..(9): Table A2; Target 6006; WT1; ENSG00000184937; HLA-C*06:02;
QRNMTKLQL

SEQ ID NO: 108849 - protein, 8 aa, Homo sapiens
  misc_feature (1)..(8): Table A2; Target 6007; WT1; ENSG00000184937; HLA-A*30:02;
QSNHSTGY

SEQ ID NO: 108850 - protein, 8 aa, Homo sapiens
  misc_feature (1)..(8): Table A2; Target 6008; WT1; ENSG00000184937; HLA-A*32:01;
QSNHSTGY

SEQ ID NO: 108851 - protein, 9 aa, Homo sapiens
  misc_feature (1)..(9): Table A2; Target 6009; WT1; ENSG00000184937; HLA-A*23:01;
QYSVPPPVY

SEQ ID NO: 108852 - protein, 9 aa, Homo sapiens
  misc_feature (1)..(9): Table A2; Target 6010; WT1; ENSG00000184937; HLA-A*24:02;
QYSVPPPVY

SEQ ID NO: 108853 - protein, 9 aa, Homo sapiens
  misc_feature (1)..(9): Table A2; Target 6011; WT1; ENSG00000184937; HLA-A*29:02;
QYSVPPPVY

SEQ ID NO: 108854 - protein, 9 aa, Homo sapiens
  misc_feature (1)..(9): Table A2; Target 6012; WT1; ENSG00000184937; HLA-A*30:02;
QYSVPPPVY

SEQ ID NO: 108855 - protein, 9 aa, Homo sapiens
  misc_feature (1)..(9): Table A2; Target 6013; WT1; ENSG00000184937; HLA-A*32:01;
QYSVPPPVY

SEQ ID NO: 108856 - protein, 9 aa, Homo sapiens
  misc_feature (1)..(9): Table A2; Target 6014; WT1; ENSG00000184937; HLA-B*15:03;
QYSVPPPVY

SEQ ID NO: 108857 - protein, 9 aa, Homo sapiens
  misc_feature (1)..(9): Table A2; Target 6015; WT1; ENSG00000184937; HLA-C*01:02;
QYSVPPPVY

SEQ ID NO: 108858 - protein, 9 aa, Homo sapiens
  misc_feature (1)..(9): Table A2; Target 6016; WT1; ENSG00000184937; HLA-C*14:02;
QYSVPPPVY

SEQ ID NO: 108859 - protein, 9 aa, Homo sapiens
  misc_feature (1)..(9): Table A2; Target 6017; WT1; ENSG00000184937; HLA-C*16:01;
QYSVPPPVY

SEQ ID NO: 108860 - protein, 9 aa, Homo sapiens
  misc_feature (1)..(9): Table A2; Target 6018; WT1; ENSG00000184937; HLA-A*03:01;
RIHTHGVFR

SEQ ID NO: 108861 - protein, 9 aa, Homo sapiens
  misc_feature (1)..(9): Table A2; Target 6019; WT1; ENSG00000184937; HLA-A*31:01;
RIHTHGVFR

SEQ ID NO: 108862 - protein, 9 aa, Homo sapiens
  misc_feature (1)..(9): Table A2; Target 6020; WT1; ENSG00000184937; HLA-A*02:01;
RMFPNAPYL

SEQ ID NO: 108863 - protein, 9 aa, Homo sapiens
  misc_feature (1)..(9): Table A2; Target 6021; WT1; ENSG00000184937; HLA-A*02:04;
RMFPNAPYL

SEQ ID NO: 108864 - protein, 9 aa, Homo sapiens
  misc_feature (1)..(9): Table A2; Target 6022; WT1; ENSG00000184937; HLA-A*02:07;
RMFPNAPYL

SEQ ID NO: 108865 - protein, 9 aa, Homo sapiens
  misc_feature (1)..(9): Table A2; Target 6023; WT1; ENSG00000184937; HLA-A*03:01;
RMFPNAPYL

SEQ ID NO: 108866 - protein, 9 aa, Homo sapiens
  misc_feature (1)..(9): Table A2; Target 6024; WT1; ENSG00000184937; HLA-A*23:01;
RMFPNAPYL

SEQ ID NO: 108867 - protein, 9 aa, Homo sapiens
  misc_feature (1)..(9): Table A2; Target 6025; WT1; ENSG00000184937; HLA-A*24:02;
RMFPNAPYL

SEQ ID NO: 108868 - protein, 9 aa, Homo sapiens
  misc_feature (1)..(9): Table A2; Target 6026; WT1; ENSG00000184937; HLA-A*32:01;
RMFPNAPYL

SEQ ID NO: 108869 - protein, 9 aa, Homo sapiens
  misc_feature (1)..(9): Table A2; Target 6027; WT1; ENSG00000184937; HLA-B*57:01;
RMFPNAPYL

SEQ ID NO: 108870 - protein, 9 aa, Homo sapiens
  misc_feature (1)..(9): Table A2; Target 6028; WT1; ENSG00000184937; HLA-C*02:02;
RMFPNAPYL

SEQ ID NO: 108871 - protein, 8 aa, Homo sapiens
  misc_feature (1)..(8): Table A2; Target 6029; WT1; ENSG00000184937; HLA-A*30:02;
RMFPNAPY

SEQ ID NO: 108872 - protein, 8 aa, Homo sapiens
  misc_feature (1)..(8): Table A2; Target 6030; WT1; ENSG00000184937; HLA-B*08:01;
RNMTKLQL

SEQ ID NO: 108873 - protein, 10 aa, Homo sapiens
  misc_feature (1)..(10): Table A2; Target 6031; WT1; ENSG00000184937; HLA-B*27:05;
RRVPGVAPTL

SEQ ID NO: 108874 - protein, 10 aa, Homo sapiens
  misc_feature (1)..(10): Table A2; Target 6032; WT1; ENSG00000184937; HLA-C*16:04;
RRVPGVAPTL

SEQ ID NO: 108875 - protein, 10 aa, Homo sapiens
  misc_feature (1)..(10): Table A2; Target 6033; WT1; ENSG00000184937; HLA-A*01:01;
RTPYSSDNLY

SEQ ID NO: 108876 - protein, 9 aa, Homo sapiens
  misc_feature (1)..(9): Table A2; Target 6034; WT1; ENSG00000184937; HLA-C*01:02;
RTPYSSDNL

SEQ ID NO: 108877 - protein, 11 aa, Homo sapiens
  misc_feature (1)..(11): Table A2; Target 6035; WT1; ENSG00000184937; HLA-A*03:01;
RVPGVAPTLVR

SEQ ID NO: 108878 - protein, 11 aa, Homo sapiens
  misc_feature (1)..(11): Table A2; Target 6036; WT1; ENSG00000184937; HLA-A*31:01;
RVPGVAPTLVR

SEQ ID NO: 108879 - protein, 10 aa, Homo sapiens
  misc_feature (1)..(10): Table A2; Target 6037; WT1; ENSG00000184937; HLA-A*02:01;
RVPGVAPTLV

SEQ ID NO: 108880 - protein, 10 aa, Homo sapiens
  misc_feature (1)..(10): Table A2; Target 6038; WT1; ENSG00000184937; HLA-A*02:03;
RVPGVAPTLV

SEQ ID NO: 108881 - protein, 10 aa, Homo sapiens
  misc_feature (1)..(10): Table A2; Target 6039; WT1; ENSG00000184937; HLA-A*02:07;
RVPGVAPTLV

SEQ ID NO: 108882 - protein, 9 aa, Homo sapiens
  misc_feature (1)..(9): Table A2; Target 6040; WT1; ENSG00000184937; HLA-A*02:04;
RVPGVAPTL

SEQ ID NO: 108883 - protein, 9 aa, Homo sapiens
  misc_feature (1)..(9): Table A2; Target 6041; WT1; ENSG00000184937; HLA-A*02:07;
RVPGVAPTL

SEQ ID NO: 108884 - protein, 9 aa, Homo sapiens
  misc_feature (1)..(9): Table A2; Target 6042; WT1; ENSG00000184937; HLA-A*23:01;
RVPGVAPTL

SEQ ID NO: 108885 - protein, 9 aa, Homo sapiens
  misc_feature (1)..(9): Table A2; Target 6043; WT1; ENSG00000184937; HLA-A*24:02;
RVPGVAPTL

SEQ ID NO: 108886 - protein, 9 aa, Homo sapiens
  misc_feature (1)..(9): Table A2; Target 6044; WT1; ENSG00000184937; HLA-A*25:01;
RVPGVAPTL

SEQ ID NO: 108887 - protein, 9 aa, Homo sapiens
  misc_feature (1)..(9): Table A2; Target 6045; WT1; ENSG00000184937; HLA-A*32:01;
RVPGVAPTL

SEQ ID NO: 108888 - protein, 9 aa, Homo sapiens
  misc_feature (1)..(9): Table A2; Target 6046; WT1; ENSG00000184937; HLA-B*07:02;
RVPGVAPTL

SEQ ID NO: 108889 - protein, 9 aa, Homo sapiens
  misc_feature (1)..(9): Table A2; Target 6047; WT1; ENSG00000184937; HLA-B*13:02;
RVPGVAPTL

SEQ ID NO: 108890 - protein, 9 aa, Homo sapiens
  misc_feature (1)..(9): Table A2; Target 6048; WT1; ENSG00000184937; HLA-B*58:01;
RVPGVAPTL

SEQ ID NO: 108891 - protein, 9 aa, Homo sapiens
  misc_feature (1)..(9): Table A2; Target 6049; WT1; ENSG00000184937; HLA-C*01:02;
RVPGVAPTL

SEQ ID NO: 108892 - protein, 9 aa, Homo sapiens
  misc_feature (1)..(9): Table A2; Target 6050; WT1; ENSG00000184937; HLA-C*03:04;
RVPGVAPTL

SEQ ID NO: 108893 - protein, 10 aa, Homo sapiens
  misc_feature (1)..(10): Table A2; Target 6051; WT1; ENSG00000184937; HLA-A*24:02;
RYFKLSHLQM

SEQ ID NO: 108894 - protein, 11 aa, Homo sapiens
  misc_feature (1)..(11): Table A2; Target 6052; WT1; ENSG00000184937; HLA-C*16:01;
SASETSEKRPF

SEQ ID NO: 108895 - protein, 9 aa, Homo sapiens
  misc_feature (1)..(9): Table A2; Target 6053; WT1; ENSG00000184937; HLA-A*68:01;
SASETSEKR

SEQ ID NO: 108896 - protein, 9 aa, Homo sapiens
  misc_feature (1)..(9): Table A2; Target 6054; WT1; ENSG00000184937; HLA-C*07:06;
SASETSEKR

SEQ ID NO: 108897 - protein, 10 aa, Homo sapiens
  misc_feature (1)..(10): Table A2; Target 6055; WT1; ENSG00000184937; HLA-B*37:01;
SDELVRHHNM

SEQ ID NO: 108898 - protein, 9 aa, Homo sapiens
  misc_feature (1)..(9): Table A2; Target 6056; WT1; ENSG00000184937; HLA-B*37:01;
SDNHTTPIL

SEQ ID NO: 108899 - protein, 8 aa, Homo sapiens
  misc_feature (1)..(8): Table A2; Target 6057; WT1; ENSG00000184937; HLA-B*37:01;
SDNHTTPI

SEQ ID NO: 108900 - protein, 9 aa, Homo sapiens
  misc_feature (1)..(9): Table A2; Target 6058; WT1; ENSG00000184937; HLA-A*30:01;
SDVRDLNAL

SEQ ID NO: 108901 - protein, 9 aa, Homo sapiens
  misc_feature (1)..(9): Table A2; Target 6059; WT1; ENSG00000184937; HLA-B*37:01;
SDVRDLNAL

SEQ ID NO: 108902 - protein, 9 aa, Homo sapiens
  misc_feature (1)..(9): Table A2; Target 6060; WT1; ENSG00000184937; HLA-B*40:01;
SDVRDLNAL

SEQ ID NO: 108903 - protein, 9 aa, Homo sapiens
  misc_feature (1)..(9): Table A2; Target 6061; WT1; ENSG00000184937; HLA-B*40:02;
SDVRDLNAL

SEQ ID NO: 108904 - protein, 9 aa, Homo sapiens
  misc_feature (1)..(9): Table A2; Target 6062; WT1; ENSG00000184937; HLA-B*44:02;
SEKPFSCRW

SEQ ID NO: 108905 - protein, 9 aa, Homo sapiens
  misc_feature (1)..(9): Table A2; Target 6063; WT1; ENSG00000184937; HLA-B*44:03;
SEKPFSCRW

SEQ ID NO: 108906 - protein, 9 aa, Homo sapiens
  misc_feature (1)..(9): Table A2; Target 6064; WT1; ENSG00000184937; HLA-B*37:01;
SETSEKRPF

SEQ ID NO: 108907 - protein, 9 aa, Homo sapiens
  misc_feature (1)..(9): Table A2; Target 6065; WT1; ENSG00000184937; HLA-B*44:02;
SETSEKRPF

SEQ ID NO: 108908 - protein, 9 aa, Homo sapiens
  misc_feature (1)..(9): Table A2; Target 6066; WT1; ENSG00000184937; HLA-B*44:03;
SETSEKRPF

SEQ ID NO: 108909 - protein, 9 aa, Homo sapiens
  misc_feature (1)..(9): Table A2; Target 6067; WT1; ENSG00000184937; HLA-C*16:01;
SETSEKRPF

SEQ ID NO: 108910 - protein, 9 aa, Homo sapiens
  misc_feature (1)..(9): Table A2; Target 6068; WT1; ENSG00000184937; HLA-A*23:01;
SFIKQEPSW

SEQ ID NO: 108911 - protein, 9 aa, Homo sapiens
  misc_feature (1)..(9): Table A2; Target 6069; WT1; ENSG00000184937; HLA-A*24:02;
SFIKQEPSW

SEQ ID NO: 108912 - protein, 11 aa, Homo sapiens
  misc_feature (1)..(11): Table A2; Target 6070; WT1; ENSG00000184937; HLA-C*06:02;
SGQFTGTAGAC

SEQ ID NO: 108913 - protein, 11 aa, Homo sapiens
  misc_feature (1)..(11): Table A2; Target 6071; WT1; ENSG00000184937; HLA-C*12:03;
SGQFTGTAGAC

SEQ ID NO: 108914 - protein, 9 aa, Homo sapiens
  misc_feature (1)..(9): Table A2; Target 6072; WT1; ENSG00000184937; HLA-A*02:01;
SLGEQQYSV

SEQ ID NO: 108915 - protein, 9 aa, Homo sapiens
  misc_feature (1)..(9): Table A2; Target 6073; WT1; ENSG00000184937; HLA-A*02:03;
SLGEQQYSV

SEQ ID NO: 108916 - protein, 9 aa, Homo sapiens
  misc_feature (1)..(9): Table A2; Target 6074; WT1; ENSG00000184937; HLA-A*02:04;
SLGEQQYSV

SEQ ID NO: 108917 - protein, 9 aa, Homo sapiens
  misc_feature (1)..(9): Table A2; Target 6075; WT1; ENSG00000184937; HLA-B*13:02;
SLGEQQYSV

SEQ ID NO: 108918 - protein, 9 aa, Homo sapiens
  misc_feature (1)..(9): Table A2; Target 6076; WT1; ENSG00000184937; HLA-B*55:01;
SLGEQQYSV

SEQ ID NO: 108919 - protein, 9 aa, Homo sapiens
  misc_feature (1)..(9): Table A2; Target 6077; WT1; ENSG00000184937; HLA-A*03:02;
SLGGPAPPP

SEQ ID NO: 108920 - protein, 9 aa, Homo sapiens
  misc_feature (1)..(9): Table A2; Target 6078; WT1; ENSG00000184937; HLA-C*06:02;
SLGGPAPPP

SEQ ID NO: 108921 - protein, 10 aa, Homo sapiens
  misc_feature (1)..(10): Table A2; Target 6079; WT1; ENSG00000184937; HLA-A*30:02;
SQALLLRTPY

SEQ ID NO: 108922 - protein, 10 aa, Homo sapiens
  misc_feature (1)..(10): Table A2; Target 6080; WT1; ENSG00000184937; HLA-A*32:01;
SQALLLRTPY

SEQ ID NO: 108923 - protein, 10 aa, Homo sapiens
  misc_feature (1)..(10): Table A2; Target 6081; WT1; ENSG00000184937; HLA-B*15:01;
SQALLLRTPY

SEQ ID NO: 108924 - protein, 10 aa, Homo sapiens
  misc_feature (1)..(10): Table A2; Target 6082; WT1; ENSG00000184937; HLA-B*15:03;
SQALLLRTPY

SEQ ID NO: 108925 - protein, 10 aa, Homo sapiens
  misc_feature (1)..(10): Table A2; Target 6083; WT1; ENSG00000184937; HLA-C*02:02;
SQALLLRTPY

SEQ ID NO: 108926 - protein, 10 aa, Homo sapiens
  misc_feature (1)..(10): Table A2; Target 6084; WT1; ENSG00000184937; HLA-C*07:04;
SQALLLRTPY

SEQ ID NO: 108927 - protein, 10 aa, Homo sapiens
  misc_feature (1)..(10): Table A2; Target 6085; WT1; ENSG00000184937; HLA-A*26:01;
SQPAIRNQGY

SEQ ID NO: 108928 - protein, 10 aa, Homo sapiens
  misc_feature (1)..(10): Table A2; Target 6086; WT1; ENSG00000184937; HLA-A*30:02;
SQPAIRNQGY

SEQ ID NO: 108929 - protein, 10 aa, Homo sapiens
  misc_feature (1)..(10): Table A2; Target 6087; WT1; ENSG00000184937; HLA-A*32:01;
SQPAIRNQGY

SEQ ID NO: 108930 - protein, 10 aa, Homo sapiens
  misc_feature (1)..(10): Table A2; Target 6088; WT1; ENSG00000184937; HLA-B*15:01;
SQPAIRNQGY

SEQ ID NO: 108931 - protein, 10 aa, Homo sapiens
  misc_feature (1)..(10): Table A2; Target 6089; WT1; ENSG00000184937; HLA-B*15:03;
SQPAIRNQGY

SEQ ID NO: 108932 - protein, 10 aa, Homo sapiens
  misc_feature (1)..(10): Table A2; Target 6090; WT1; ENSG00000184937; HLA-C*07:04;
SQPAIRNQGY

SEQ ID NO: 108933 - protein, 8 aa, Homo sapiens
  misc_feature (1)..(8): Table A2; Target 6091; WT1; ENSG00000184937; HLA-C*05:01;
SSDNLYQM

SEQ ID NO: 108934 - protein, 8 aa, Homo sapiens
  misc_feature (1)..(8): Table A2; Target 6092; WT1; ENSG00000184937; HLA-C*16:01;
SSGQARMF

SEQ ID NO: 108935 - protein, 11 aa, Homo sapiens
  misc_feature (1)..(11): Table A2; Target 6093; WT1; ENSG00000184937; HLA-A*01:01;
STVTFDGTPSY

SEQ ID NO: 108936 - protein, 11 aa, Homo sapiens
  misc_feature (1)..(11): Table A2; Target 6094; WT1; ENSG00000184937; HLA-A*25:01;
STVTFDGTPSY

SEQ ID NO: 108937 - protein, 11 aa, Homo sapiens
  misc_feature (1)..(11): Table A2; Target 6095; WT1; ENSG00000184937; HLA-A*26:01;
STVTFDGTPSY

SEQ ID NO: 108938 - protein, 11 aa, Homo sapiens
  misc_feature (1)..(11): Table A2; Target 6096; WT1; ENSG00000184937; HLA-A*29:02;
STVTFDGTPSY

SEQ ID NO: 108939 - protein, 11 aa, Homo sapiens
  misc_feature (1)..(11): Table A2; Target 6097; WT1; ENSG00000184937; HLA-A*30:02;
STVTFDGTPSY

SEQ ID NO: 108940 - protein, 11 aa, Homo sapiens
  misc_feature (1)..(11): Table A2; Target 6098; WT1; ENSG00000184937; HLA-B*46:01;
STVTFDGTPSY

SEQ ID NO: 108941 - protein, 11 aa, Homo sapiens
  misc_feature (1)..(11): Table A2; Target 6099; WT1; ENSG00000184937; HLA-B*57:01;
STVTFDGTPSY

SEQ ID NO: 108942 - protein, 11 aa, Homo sapiens
  misc_feature (1)..(11): Table A2; Target 6100; WT1; ENSG00000184937; HLA-B*58:01;
STVTFDGTPSY

SEQ ID NO: 108943 - protein, 9 aa, Homo sapiens
  misc_feature (1)..(9): Table A2; Target 6101; WT1; ENSG00000184937; HLA-A*02:01;
SVPPPVYGC

SEQ ID NO: 108944 - protein, 9 aa, Homo sapiens
  misc_feature (1)..(9): Table A2; Target 6102; WT1; ENSG00000184937; HLA-A*02:07;
SVPPPVYGC

SEQ ID NO: 108945 - protein, 11 aa, Homo sapiens
  misc_feature (1)..(11): Table A2; Target 6103; WT1; ENSG00000184937; HLA-B*27:02;
TEGQSNHSTGY

SEQ ID NO: 108946 - protein, 11 aa, Homo sapiens
  misc_feature (1)..(11): Table A2; Target 6104; WT1; ENSG00000184937; HLA-B*44:02;
TEGQSNHSTGY

SEQ ID NO: 108947 - protein, 11 aa, Homo sapiens
  misc_feature (1)..(11): Table A2; Target 6105; WT1; ENSG00000184937; HLA-B*44:03;
TEGQSNHSTGY

SEQ ID NO: 108948 - protein, 11 aa, Homo sapiens
  misc_feature (1)..(11): Table A2; Target 6106; WT1; ENSG00000184937; HLA-C*04:01;
TEGQSNHSTGY

SEQ ID NO: 108949 - protein, 11 aa, Homo sapiens
  misc_feature (1)..(11): Table A2; Target 6107; WT1; ENSG00000184937; HLA-C*16:04;
TEGQSNHSTGY

SEQ ID NO: 108950 - protein, 9 aa, Homo sapiens
  misc_feature (1)..(9): Table A2; Target 6108; WT1; ENSG00000184937; HLA-C*04:01;
TFDGTPSYG

SEQ ID NO: 108951 - protein, 8 aa, Homo sapiens
  misc_feature (1)..(8): Table A2; Target 6109; WT1; ENSG00000184937; HLA-A*32:01;
TFDGTPSY

SEQ ID NO: 108952 - protein, 8 aa, Homo sapiens
  misc_feature (1)..(8): Table A2; Target 6110; WT1; ENSG00000184937; HLA-B*18:01;
TFDGTPSY

SEQ ID NO: 108953 - protein, 8 aa, Homo sapiens
  misc_feature (1)..(8): Table A2; Target 6111; WT1; ENSG00000184937; HLA-C*04:01;
TFDGTPSY

SEQ ID NO: 108954 - protein, 8 aa, Homo sapiens
  misc_feature (1)..(8): Table A2; Target 6112; WT1; ENSG00000184937; HLA-C*14:02;
TFDGTPSY

SEQ ID NO: 108955 - protein, 9 aa, Homo sapiens
  misc_feature (1)..(9): Table A2; Target 6113; WT1; ENSG00000184937; HLA-C*16:01;
TGKTSEKPF

SEQ ID NO: 108956 - protein, 9 aa, Homo sapiens
  misc_feature (1)..(9): Table A2; Target 6114; WT1; ENSG00000184937; HLA-A*68:01;
TGSQALLLR

SEQ ID NO: 108957 - protein, 9 aa, Homo sapiens
  misc_feature (1)..(9): Table A2; Target 6115; WT1; ENSG00000184937; HLA-C*07:06;
TGSQALLLR

SEQ ID NO: 108958 - protein, 9 aa, Homo sapiens
  misc_feature (1)..(9): Table A2; Target 6116; WT1; ENSG00000184937; HLA-B*39:01;
TGTAGACRY

SEQ ID NO: 108959 - protein, 9 aa, Homo sapiens
  misc_feature (1)..(9): Table A2; Target 6117; WT1; ENSG00000184937; HLA-C*16:01;
TGTAGACRY

SEQ ID NO: 108960 - protein, 9 aa, Homo sapiens
  misc_feature (1)..(9): Table A2; Target 6118; WT1; ENSG00000184937; HLA-C*16:02;
TGTAGACRY

SEQ ID NO: 108961 - protein, 9 aa, Homo sapiens
  misc_feature (1)..(9): Table A2; Target 6119; WT1; ENSG00000184937; HLA-B*35:01;
TPILCGAQY

SEQ ID NO: 108962 - protein, 9 aa, Homo sapiens
  misc_feature (1)..(9): Table A2; Target 6120; WT1; ENSG00000184937; HLA-B*55:01;
TPILCGAQY

SEQ ID NO: 108963 - protein, 9 aa, Homo sapiens
  misc_feature (1)..(9): Table A2; Target 6121; WT1; ENSG00000184937; HLA-B*07:02;
TPSHHAAQF

SEQ ID NO: 108964 - protein, 9 aa, Homo sapiens
  misc_feature (1)..(9): Table A2; Target 6122; WT1; ENSG00000184937; HLA-B*35:01;
TPSHHAAQF

SEQ ID NO: 108965 - protein, 9 aa, Homo sapiens
  misc_feature (1)..(9): Table A2; Target 6123; WT1; ENSG00000184937; HLA-B*35:03;
TPSHHAAQF

SEQ ID NO: 108966 - protein, 11 aa, Homo sapiens
  misc_feature (1)..(11): Table A2; Target 6124; WT1; ENSG00000184937; HLA-B*35:01;
TPYSSDNLYQM

SEQ ID NO: 108967 - protein, 11 aa, Homo sapiens
  misc_feature (1)..(11): Table A2; Target 6125; WT1; ENSG00000184937; HLA-B*35:03;
TPYSSDNLYQM

SEQ ID NO: 108968 - protein, 11 aa, Homo sapiens
  misc_feature (1)..(11): Table A2; Target 6126; WT1; ENSG00000184937; HLA-B*55:01;
TPYSSDNLYQM

SEQ ID NO: 108969 - protein, 11 aa, Homo sapiens
  misc_feature (1)..(11): Table A2; Target 6127; WT1; ENSG00000184937; HLA-B*56:01;
TPYSSDNLYQM

SEQ ID NO: 108970 - protein, 9 aa, Homo sapiens
  misc_feature (1)..(9): Table A2; Target 6128; WT1; ENSG00000184937; HLA-A*26:01;
TPYSSDNLY

SEQ ID NO: 108971 - protein, 9 aa, Homo sapiens
  misc_feature (1)..(9): Table A2; Target 6129; WT1; ENSG00000184937; HLA-B*15:01;
TPYSSDNLY

SEQ ID NO: 108972 - protein, 9 aa, Homo sapiens
  misc_feature (1)..(9): Table A2; Target 6130; WT1; ENSG00000184937; HLA-B*15:03;
TPYSSDNLY

SEQ ID NO: 108973 - protein, 9 aa, Homo sapiens
  misc_feature (1)..(9): Table A2; Target 6131; WT1; ENSG00000184937; HLA-B*35:01;
TPYSSDNLY

SEQ ID NO: 108974 - protein, 9 aa, Homo sapiens
  misc_feature (1)..(9): Table A2; Target 6132; WT1; ENSG00000184937; HLA-B*35:03;
TPYSSDNLY

SEQ ID NO: 108975 - protein, 9 aa, Homo sapiens
  misc_feature (1)..(9): Table A2; Target 6133; WT1; ENSG00000184937; HLA-B*55:01;
TPYSSDNLY

SEQ ID NO: 108976 - protein, 9 aa, Homo sapiens
  misc_feature (1)..(9): Table A2; Target 6134; WT1; ENSG00000184937; HLA-C*03:03;
TPYSSDNLY

SEQ ID NO: 108977 - protein, 9 aa, Homo sapiens
  misc_feature (1)..(9): Table A2; Target 6135; WT1; ENSG00000184937; HLA-C*07:04;
TPYSSDNLY

SEQ ID NO: 108978 - protein, 8 aa, Homo sapiens
  misc_feature (1)..(8): Table A2; Target 6136; WT1; ENSG00000184937; HLA-B*07:02;
TPYSSDNL

SEQ ID NO: 108979 - protein, 8 aa, Homo sapiens
  misc_feature (1)..(8): Table A2; Target 6137; WT1; ENSG00000184937; HLA-B*35:03;
TPYSSDNL

SEQ ID NO: 108980 - protein, 8 aa, Homo sapiens
  misc_feature (1)..(8): Table A2; Target 6138; WT1; ENSG00000184937; HLA-B*39:01;
TPYSSDNL

SEQ ID NO: 108981 - protein, 8 aa, Homo sapiens
  misc_feature (1)..(8): Table A2; Target 6139; WT1; ENSG00000184937; HLA-B*51:01;
TPYSSDNL

SEQ ID NO: 108982 - protein, 8 aa, Homo sapiens
  misc_feature (1)..(8): Table A2; Target 6140; WT1; ENSG00000184937; HLA-C*07:02;
TPYSSDNL

SEQ ID NO: 108983 - protein, 9 aa, Homo sapiens
  misc_feature (1)..(9): Table A2; Target 6141; WT1; ENSG00000184937; HLA-B*57:01;
TSQLECMTW

SEQ ID NO: 108984 - protein, 9 aa, Homo sapiens
  misc_feature (1)..(9): Table A2; Target 6142; WT1; ENSG00000184937; HLA-B*58:01;
TSQLECMTW

SEQ ID NO: 108985 - protein, 10 aa, Homo sapiens
  misc_feature (1)..(10): Table A2; Target 6143; WT1; ENSG00000184937; HLA-A*26:01;
TTPILCGAQY

SEQ ID NO: 108986 - protein, 10 aa, Homo sapiens
  misc_feature (1)..(10): Table A2; Target 6144; WT1; ENSG00000184937; HLA-A*01:01;
TVTFDGTPSY

SEQ ID NO: 108987 - protein, 10 aa, Homo sapiens
  misc_feature (1)..(10): Table A2; Target 6145; WT1; ENSG00000184937; HLA-A*25:01;
TVTFDGTPSY

SEQ ID NO: 108988 - protein, 10 aa, Homo sapiens
  misc_feature (1)..(10): Table A2; Target 6146; WT1; ENSG00000184937; HLA-A*26:01;
TVTFDGTPSY

SEQ ID NO: 108989 - protein, 10 aa, Homo sapiens
  misc_feature (1)..(10): Table A2; Target 6147; WT1; ENSG00000184937; HLA-A*30:02;
TVTFDGTPSY

SEQ ID NO: 108990 - protein, 10 aa, Homo sapiens
  misc_feature (1)..(10): Table A2; Target 6148; WT1; ENSG00000184937; HLA-B*15:01;
TVTFDGTPSY

SEQ ID NO: 108991 - protein, 10 aa, Homo sapiens
  misc_feature (1)..(10): Table A2; Target 6149; WT1; ENSG00000184937; HLA-B*39:01;
TVTFDGTPSY

SEQ ID NO: 108992 - protein, 11 aa, Homo sapiens
  misc_feature (1)..(11): Table A2; Target 6150; WT1; ENSG00000184937; HLA-A*25:01;
VAAGSSSSVKW

SEQ ID NO: 108993 - protein, 11 aa, Homo sapiens
  misc_feature (1)..(11): Table A2; Target 6151; WT1; ENSG00000184937; HLA-A*32:01;
VAAGSSSSVKW

SEQ ID NO: 108994 - protein, 11 aa, Homo sapiens
  misc_feature (1)..(11): Table A2; Target 6152; WT1; ENSG00000184937; HLA-A*33:01;
VAAGSSSSVKW

SEQ ID NO: 108995 - protein, 11 aa, Homo sapiens
  misc_feature (1)..(11): Table A2; Target 6153; WT1; ENSG00000184937; HLA-B*57:01;
VAAGSSSSVKW

SEQ ID NO: 108996 - protein, 11 aa, Homo sapiens
  misc_feature (1)..(11): Table A2; Target 6154; WT1; ENSG00000184937; HLA-B*58:01;
VAAGSSSSVKW

SEQ ID NO: 108997 - protein, 11 aa, Homo sapiens
  misc_feature (1)..(11): Table A2; Target 6155; WT1; ENSG00000184937; HLA-C*02:02;
VAAGSSSSVKW

SEQ ID NO: 108998 - protein, 11 aa, Homo sapiens
  misc_feature (1)..(11): Table A2; Target 6156; WT1; ENSG00000184937; HLA-C*16:02;
VAAGSSSSVKW

SEQ ID NO: 108999 - protein, 11 aa, Homo sapiens
  misc_feature (1)..(11): Table A2; Target 6157; WT1; ENSG00000184937; HLA-C*16:04;
VAAGSSSSVKW

SEQ ID NO: 109000 - protein, 10 aa, Homo sapiens
  misc_feature (1)..(10): Table A2; Target 6158; WT1; ENSG00000184937; HLA-A*03:02;
VAAGSSSSVK

SEQ ID NO: 109001 - protein, 9 aa, Homo sapiens
  misc_feature (1)..(9): Table A2; Target 6159; WT1; ENSG00000184937; HLA-A*02:03;
VAAGSSSSV

SEQ ID NO: 109002 - protein, 9 aa, Homo sapiens
  misc_feature (1)..(9): Table A2; Target 6160; WT1; ENSG00000184937; HLA-B*13:02;
VAAGSSSSV

SEQ ID NO: 109003 - protein, 9 aa, Homo sapiens
  misc_feature (1)..(9): Table A2; Target 6161; WT1; ENSG00000184937; HLA-B*15:03;
VAAGSSSSV

SEQ ID NO: 109004 - protein, 9 aa, Homo sapiens
  misc_feature (1)..(9): Table A2; Target 6162; WT1; ENSG00000184937; HLA-B*39:01;
VAAGSSSSV

SEQ ID NO: 109005 - protein, 9 aa, Homo sapiens
  misc_feature (1)..(9): Table A2; Target 6163; WT1; ENSG00000184937; HLA-B*46:01;
VAAGSSSSV

SEQ ID NO: 109006 - protein, 9 aa, Homo sapiens
  misc_feature (1)..(9): Table A2; Target 6164; WT1; ENSG00000184937; HLA-B*51:01;
VAAGSSSSV

SEQ ID NO: 109007 - protein, 9 aa, Homo sapiens
  misc_feature (1)..(9): Table A2; Target 6165; WT1; ENSG00000184937; HLA-B*56:01;
VAAGSSSSV

SEQ ID NO: 109008 - protein, 9 aa, Homo sapiens
  misc_feature (1)..(9): Table A2; Target 6166; WT1; ENSG00000184937; HLA-C*01:02;
VAAGSSSSV

SEQ ID NO: 109009 - protein, 9 aa, Homo sapiens
  misc_feature (1)..(9): Table A2; Target 6167; WT1; ENSG00000184937; HLA-C*02:02;
VAAGSSSSV

SEQ ID NO: 109010 - protein, 9 aa, Homo sapiens
  misc_feature (1)..(9): Table A2; Target 6168; WT1; ENSG00000184937; HLA-C*03:03;
VAAGSSSSV

SEQ ID NO: 109011 - protein, 9 aa, Homo sapiens
  misc_feature (1)..(9): Table A2; Target 6169; WT1; ENSG00000184937; HLA-C*03:04;
VAAGSSSSV

SEQ ID NO: 109012 - protein, 9 aa, Homo sapiens
  misc_feature (1)..(9): Table A2; Target 6170; WT1; ENSG00000184937; HLA-C*05:01;
VAAGSSSSV

SEQ ID NO: 109013 - protein, 9 aa, Homo sapiens
  misc_feature (1)..(9): Table A2; Target 6171; WT1; ENSG00000184937; HLA-C*12:03;
VAAGSSSSV

SEQ ID NO: 109014 - protein, 9 aa, Homo sapiens
  misc_feature (1)..(9): Table A2; Target 6172; WT1; ENSG00000184937; HLA-C*14:02;
VAAGSSSSV

SEQ ID NO: 109015 - protein, 9 aa, Homo sapiens
  misc_feature (1)..(9): Table A2; Target 6173; WT1; ENSG00000184937; HLA-C*16:02;
VAAGSSSSV

SEQ ID NO: 109016 - protein, 9 aa, Homo sapiens
  misc_feature (1)..(9): Table A2; Target 6174; WT1; ENSG00000184937; HLA-C*16:04;
VAAGSSSSV

SEQ ID NO: 109017 - protein, 9 aa, Homo sapiens
  misc_feature (1)..(9): Table A2; Target 6175; WT1; ENSG00000184937; HLA-B*46:01;
VAPTLVRSA

SEQ ID NO: 109018 - protein, 9 aa, Homo sapiens
  misc_feature (1)..(9): Table A2; Target 6176; WT1; ENSG00000184937; HLA-C*01:02;
VAPTLVRSA

SEQ ID NO: 109019 - protein, 9 aa, Homo sapiens
  misc_feature (1)..(9): Table A2; Target 6177; WT1; ENSG00000184937; HLA-C*16:01;
VAPTLVRSA

SEQ ID NO: 109020 - protein, 9 aa, Homo sapiens
  misc_feature (1)..(9): Table A2; Target 6178; WT1; ENSG00000184937; HLA-A*02:01;
VLDFAPPGA

SEQ ID NO: 109021 - protein, 9 aa, Homo sapiens
  misc_feature (1)..(9): Table A2; Target 6179; WT1; ENSG00000184937; HLA-A*02:07;
VLDFAPPGA

SEQ ID NO: 109022 - protein, 9 aa, Homo sapiens
  misc_feature (1)..(9): Table A2; Target 6180; WT1; ENSG00000184937; HLA-B*51:01;
VPGVAPTLV

SEQ ID NO: 109023 - protein, 9 aa, Homo sapiens
  misc_feature (1)..(9): Table A2; Target 6181; WT1; ENSG00000184937; HLA-B*56:01;
VPGVAPTLV

SEQ ID NO: 109024 - protein, 9 aa, Homo sapiens
  misc_feature (1)..(9): Table A2; Target 6182; WT1; ENSG00000184937; HLA-C*04:01;
VPGVAPTLV

SEQ ID NO: 109025 - protein, 8 aa, Homo sapiens
  misc_feature (1)..(8): Table A2; Target 6183; WT1; ENSG00000184937; HLA-A*23:01;
VPGVAPTL

SEQ ID NO: 109026 - protein, 8 aa, Homo sapiens
  misc_feature (1)..(8): Table A2; Target 6184; WT1; ENSG00000184937; HLA-B*07:02;
VPGVAPTL

SEQ ID NO: 109027 - protein, 8 aa, Homo sapiens
  misc_feature (1)..(8): Table A2; Target 6185; WT1; ENSG00000184937; HLA-B*08:01;
VPGVAPTL

SEQ ID NO: 109028 - protein, 8 aa, Homo sapiens
  misc_feature (1)..(8): Table A2; Target 6186; WT1; ENSG00000184937; HLA-B*35:01;
VPGVAPTL

SEQ ID NO: 109029 - protein, 8 aa, Homo sapiens
  misc_feature (1)..(8): Table A2; Target 6187; WT1; ENSG00000184937; HLA-B*35:03;
VPGVAPTL

SEQ ID NO: 109030 - protein, 8 aa, Homo sapiens
  misc_feature (1)..(8): Table A2; Target 6188; WT1; ENSG00000184937; HLA-B*51:01;
VPGVAPTL

SEQ ID NO: 109031 - protein, 8 aa, Homo sapiens
  misc_feature (1)..(8): Table A2; Target 6189; WT1; ENSG00000184937; HLA-B*55:01;
VPGVAPTL

SEQ ID NO: 109032 - protein, 8 aa, Homo sapiens
  misc_feature (1)..(8): Table A2; Target 6190; WT1; ENSG00000184937; HLA-B*56:01;
VPGVAPTL

SEQ ID NO: 109033 - protein, 8 aa, Homo sapiens
  misc_feature (1)..(8): Table A2; Target 6191; WT1; ENSG00000184937; HLA-C*05:01;
VPGVAPTL

SEQ ID NO: 109034 - protein, 8 aa, Homo sapiens
  misc_feature (1)..(8): Table A2; Target 6192; WT1; ENSG00000184937; HLA-C*07:02;
VPGVAPTL

SEQ ID NO: 109035 - protein, 8 aa, Homo sapiens
  misc_feature (1)..(8): Table A2; Target 6193; WT1; ENSG00000184937; HLA-C*14:02;
VPGVAPTL

SEQ ID NO: 109036 - protein, 8 aa, Homo sapiens
  misc_feature (1)..(8): Table A2; Target 6194; WT1; ENSG00000184937; HLA-B*51:01;
VPPPVYGC

SEQ ID NO: 109037 - protein, 10 aa, Homo sapiens
  misc_feature (1)..(10): Table A2; Target 6195; WT1; ENSG00000184937; HLA-C*12:03;
VTFDGTPSYG

SEQ ID NO: 109038 - protein, 9 aa, Homo sapiens
  misc_feature (1)..(9): Table A2; Target 6196; WT1; ENSG00000184937; HLA-A*01:01;
VTFDGTPSY

SEQ ID NO: 109039 - protein, 9 aa, Homo sapiens
  misc_feature (1)..(9): Table A2; Target 6197; WT1; ENSG00000184937; HLA-A*03:01;
VTFDGTPSY

SEQ ID NO: 109040 - protein, 9 aa, Homo sapiens
  misc_feature (1)..(9): Table A2; Target 6198; WT1; ENSG00000184937; HLA-A*03:02;
VTFDGTPSY

SEQ ID NO: 109041 - protein, 9 aa, Homo sapiens
  misc_feature (1)..(9): Table A2; Target 6199; WT1; ENSG00000184937; HLA-A*11:01;
VTFDGTPSY

SEQ ID NO: 109042 - protein, 9 aa, Homo sapiens
  misc_feature (1)..(9): Table A2; Target 6200; WT1; ENSG00000184937; HLA-A*23:01;
VTFDGTPSY

SEQ ID NO: 109043 - protein, 9 aa, Homo sapiens
  misc_feature (1)..(9): Table A2; Target 6201; WT1; ENSG00000184937; HLA-A*25:01;
VTFDGTPSY

SEQ ID NO: 109044 - protein, 9 aa, Homo sapiens
  misc_feature (1)..(9): Table A2; Target 6202; WT1; ENSG00000184937; HLA-A*26:01;
VTFDGTPSY

SEQ ID NO: 109045 - protein, 9 aa, Homo sapiens
  misc_feature (1)..(9): Table A2; Target 6203; WT1; ENSG00000184937; HLA-A*29:02;
VTFDGTPSY

SEQ ID NO: 109046 - protein, 9 aa, Homo sapiens
  misc_feature (1)..(9): Table A2; Target 6204; WT1; ENSG00000184937; HLA-A*30:02;
VTFDGTPSY

SEQ ID NO: 109047 - protein, 9 aa, Homo sapiens
  misc_feature (1)..(9): Table A2; Target 6205; WT1; ENSG00000184937; HLA-A*32:01;
VTFDGTPSY

SEQ ID NO: 109048 - protein, 9 aa, Homo sapiens
  misc_feature (1)..(9): Table A2; Target 6206; WT1; ENSG00000184937; HLA-B*13:02;
VTFDGTPSY

SEQ ID NO: 109049 - protein, 9 aa, Homo sapiens
  misc_feature (1)..(9): Table A2; Target 6207; WT1; ENSG00000184937; HLA-B*15:01;
VTFDGTPSY

SEQ ID NO: 109050 - protein, 9 aa, Homo sapiens
  misc_feature (1)..(9): Table A2; Target 6208; WT1; ENSG00000184937; HLA-B*15:03;
VTFDGTPSY

SEQ ID NO: 109051 - protein, 9 aa, Homo sapiens
  misc_feature (1)..(9): Table A2; Target 6209; WT1; ENSG00000184937; HLA-B*18:01;
VTFDGTPSY

SEQ ID NO: 109052 - protein, 9 aa, Homo sapiens
  misc_feature (1)..(9): Table A2; Target 6210; WT1; ENSG00000184937; HLA-B*27:02;
VTFDGTPSY

SEQ ID NO: 109053 - protein, 9 aa, Homo sapiens
  misc_feature (1)..(9): Table A2; Target 6211; WT1; ENSG00000184937; HLA-B*27:05;
VTFDGTPSY

SEQ ID NO: 109054 - protein, 9 aa, Homo sapiens
  misc_feature (1)..(9): Table A2; Target 6212; WT1; ENSG00000184937; HLA-B*35:01;
VTFDGTPSY

SEQ ID NO: 109055 - protein, 9 aa, Homo sapiens
  misc_feature (1)..(9): Table A2; Target 6213; WT1; ENSG00000184937; HLA-B*39:01;
VTFDGTPSY

SEQ ID NO: 109056 - protein, 9 aa, Homo sapiens
  misc_feature (1)..(9): Table A2; Target 6214; WT1; ENSG00000184937; HLA-B*44:03;
VTFDGTPSY

SEQ ID NO: 109057 - protein, 9 aa, Homo sapiens
  misc_feature (1)..(9): Table A2; Target 6215; WT1; ENSG00000184937; HLA-B*46:01;
VTFDGTPSY

SEQ ID NO: 109058 - protein, 9 aa, Homo sapiens
  misc_feature (1)..(9): Table A2; Target 6216; WT1; ENSG00000184937; HLA-B*57:01;
VTFDGTPSY

SEQ ID NO: 109059 - protein, 9 aa, Homo sapiens
  misc_feature (1)..(9): Table A2; Target 6217; WT1; ENSG00000184937; HLA-B*58:01;
VTFDGTPSY

SEQ ID NO: 109060 - protein, 9 aa, Homo sapiens
  misc_feature (1)..(9): Table A2; Target 6218; WT1; ENSG00000184937; HLA-C*01:02;
VTFDGTPSY

SEQ ID NO: 109061 - protein, 9 aa, Homo sapiens
  misc_feature (1)..(9): Table A2; Target 6219; WT1; ENSG00000184937; HLA-C*02:02;
VTFDGTPSY

SEQ ID NO: 109062 - protein, 9 aa, Homo sapiens
  misc_feature (1)..(9): Table A2; Target 6220; WT1; ENSG00000184937; HLA-C*03:03;
VTFDGTPSY

SEQ ID NO: 109063 - protein, 9 aa, Homo sapiens
  misc_feature (1)..(9): Table A2; Target 6221; WT1; ENSG00000184937; HLA-C*03:04;
VTFDGTPSY

SEQ ID NO: 109064 - protein, 9 aa, Homo sapiens
  misc_feature (1)..(9): Table A2; Target 6222; WT1; ENSG00000184937; HLA-C*05:01;
VTFDGTPSY

SEQ ID NO: 109065 - protein, 9 aa, Homo sapiens
  misc_feature (1)..(9): Table A2; Target 6223; WT1; ENSG00000184937; HLA-C*07:04;
VTFDGTPSY

SEQ ID NO: 109066 - protein, 9 aa, Homo sapiens
  misc_feature (1)..(9): Table A2; Target 6224; WT1; ENSG00000184937; HLA-C*07:06;
VTFDGTPSY

SEQ ID NO: 109067 - protein, 9 aa, Homo sapiens
  misc_feature (1)..(9): Table A2; Target 6225; WT1; ENSG00000184937; HLA-C*12:03;
VTFDGTPSY

SEQ ID NO: 109068 - protein, 9 aa, Homo sapiens
  misc_feature (1)..(9): Table A2; Target 6226; WT1; ENSG00000184937; HLA-C*14:02;
VTFDGTPSY

SEQ ID NO: 109069 - protein, 9 aa, Homo sapiens
  misc_feature (1)..(9): Table A2; Target 6227; WT1; ENSG00000184937; HLA-C*16:01;
VTFDGTPSY

SEQ ID NO: 109070 - protein, 9 aa, Homo sapiens
  misc_feature (1)..(9): Table A2; Target 6228; WT1; ENSG00000184937; HLA-C*16:02;
VTFDGTPSY

SEQ ID NO: 109071 - protein, 9 aa, Homo sapiens
  misc_feature (1)..(9): Table A2; Target 6229; WT1; ENSG00000184937; HLA-C*16:04;
VTFDGTPSY

SEQ ID NO: 109072 - protein, 11 aa, Homo sapiens
  misc_feature (1)..(11): Table A2; Target 6230; WT1; ENSG00000184937; HLA-A*30:01;
YESDNHTTPIL

SEQ ID NO: 109073 - protein, 11 aa, Homo sapiens
  misc_feature (1)..(11): Table A2; Target 6231; WT1; ENSG00000184937; HLA-B*40:01;
YESDNHTTPIL

SEQ ID NO: 109074 - protein, 11 aa, Homo sapiens
  misc_feature (1)..(11): Table A2; Target 6232; WT1; ENSG00000184937; HLA-B*40:02;
YESDNHTTPIL

SEQ ID NO: 109075 - protein, 11 aa, Homo sapiens
  misc_feature (1)..(11): Table A2; Target 6233; WT1; ENSG00000184937; HLA-C*16:04;
YESDNHTTPIL

SEQ ID NO: 109076 - protein, 10 aa, Homo sapiens
  misc_feature (1)..(10): Table A2; Target 6234; WT1; ENSG00000184937; HLA-B*40:01;
YESDNHTTPI

SEQ ID NO: 109077 - protein, 10 aa, Homo sapiens
  misc_feature (1)..(10): Table A2; Target 6235; WT1; ENSG00000184937; HLA-B*49:01;
YESDNHTTPI

SEQ ID NO: 109078 - protein, 9 aa, Homo sapiens
  misc_feature (1)..(9): Table A2; Target 6236; WT1; ENSG00000184937; HLA-B*49:01;
YESDNHTTP

SEQ ID NO: 109079 - protein, 9 aa, Homo sapiens
  misc_feature (1)..(9): Table A2; Target 6237; WT1; ENSG00000184937; HLA-C*16:04;
YESDNHTTP

SEQ ID NO: 109080 - protein, 10 aa, Homo sapiens
  misc_feature (1)..(10): Table A2; Target 6238; WT1; ENSG00000184937; HLA-C*04:01;
YGPFGPPPPS

SEQ ID NO: 109081 - protein, 10 aa, Homo sapiens
  misc_feature (1)..(10): Table A2; Target 6239; WT1; ENSG00000184937; HLA-C*06:02;
YGPFGPPPPS

SEQ ID NO: 109082 - protein, 10 aa, Homo sapiens
  misc_feature (1)..(10): Table A2; Target 6240; WT1; ENSG00000184937; HLA-C*07:02;
YGPFGPPPPS

SEQ ID NO: 109083 - protein, 9 aa, Homo sapiens
  misc_feature (1)..(9): Table A2; Target 6241; WT1; ENSG00000184937; HLA-B*54:01;
YGPFGPPPP

SEQ ID NO: 109084 - protein, 9 aa, Homo sapiens
  misc_feature (1)..(9): Table A2; Target 6242; WT1; ENSG00000184937; HLA-C*04:01;
YGPFGPPPP

SEQ ID NO: 109085 - protein, 10 aa, Homo sapiens
  misc_feature (1)..(10): Table A2; Target 6243; WT1; ENSG00000184937; HLA-C*07:04;
YQMTSQLECM

SEQ ID NO: 109086 - protein, 9 aa, Homo sapiens
  misc_feature (1)..(9): Table A2; Target 6244; WT1; ENSG00000184937; HLA-B*13:02;
YQMTSQLEC

SEQ ID NO: 109087 - protein, 9 aa, Homo sapiens
  misc_feature (1)..(9): Table A2; Target 6245; WT1; ENSG00000184937; HLA-B*15:01;
YQMTSQLEC

SEQ ID NO: 109088 - protein, 9 aa, Homo sapiens
  misc_feature (1)..(9): Table A2; Target 6246; WT1; ENSG00000184937; HLA-B*39:01;
YQMTSQLEC

SEQ ID NO: 109089 - protein, 9 aa, Homo sapiens
  misc_feature (1)..(9): Table A2; Target 6247; WT1; ENSG00000184937; HLA-C*03:03;
YQMTSQLEC

SEQ ID NO: 109090 - protein, 9 aa, Homo sapiens
  misc_feature (1)..(9): Table A2; Target 6248; WT1; ENSG00000184937; HLA-C*03:04;
YQMTSQLEC

SEQ ID NO: 109091 - protein, 9 aa, Homo sapiens
  misc_feature (1)..(9): Table A2; Target 6249; WT1; ENSG00000184937; HLA-C*16:02;
YQMTSQLEC

SEQ ID NO: 109092 - protein, 9 aa, Homo sapiens
  misc_feature (1)..(9): Table A2; Target 6250; WT1; ENSG00000184937; HLA-A*01:01;
YSSDNLYQM

SEQ ID NO: 109093 - protein, 9 aa, Homo sapiens
  misc_feature (1)..(9): Table A2; Target 6251; WT1; ENSG00000184937; HLA-A*02:01;
YSSDNLYQM

SEQ ID NO: 109094 - protein, 9 aa, Homo sapiens
  misc_feature (1)..(9): Table A2; Target 6252; WT1; ENSG00000184937; HLA-A*26:01;
YSSDNLYQM

SEQ ID NO: 109095 - protein, 9 aa, Homo sapiens
  misc_feature (1)..(9): Table A2; Target 6253; WT1; ENSG00000184937; HLA-A*68:02;
YSSDNLYQM

SEQ ID NO: 109096 - protein, 9 aa, Homo sapiens
  misc_feature (1)..(9): Table A2; Target 6254; WT1; ENSG00000184937; HLA-B*35:01;
YSSDNLYQM

SEQ ID NO: 109097 - protein, 9 aa, Homo sapiens
  misc_feature (1)..(9): Table A2; Target 6255; WT1; ENSG00000184937; HLA-B*35:03;
YSSDNLYQM

SEQ ID NO: 109098 - protein, 9 aa, Homo sapiens
  misc_feature (1)..(9): Table A2; Target 6256; WT1; ENSG00000184937; HLA-B*39:01;
YSSDNLYQM

SEQ ID NO: 109099 - protein, 9 aa, Homo sapiens
  misc_feature (1)..(9): Table A2; Target 6257; WT1; ENSG00000184937; HLA-B*46:01;
YSSDNLYQM

SEQ ID NO: 109100 - protein, 9 aa, Homo sapiens
  misc_feature (1)..(9): Table A2; Target 6258; WT1; ENSG00000184937; HLA-B*58:01;
YSSDNLYQM

SEQ ID NO: 109101 - protein, 9 aa, Homo sapiens
  misc_feature (1)..(9): Table A2; Target 6259; WT1; ENSG00000184937; HLA-C*02:02;
YSSDNLYQM

SEQ ID NO: 109102 - protein, 9 aa, Homo sapiens
  misc_feature (1)..(9): Table A2; Target 6260; WT1; ENSG00000184937; HLA-C*03:03;
YSSDNLYQM

SEQ ID NO: 109103 - protein, 9 aa, Homo sapiens
  misc_feature (1)..(9): Table A2; Target 6261; WT1; ENSG00000184937; HLA-C*03:04;
YSSDNLYQM

SEQ ID NO: 109104 - protein, 9 aa, Homo sapiens
  misc_feature (1)..(9): Table A2; Target 6262; WT1; ENSG00000184937; HLA-C*07:04;
YSSDNLYQM

SEQ ID NO: 109105 - protein, 9 aa, Homo sapiens
  misc_feature (1)..(9): Table A2; Target 6263; WT1; ENSG00000184937; HLA-C*12:03;
YSSDNLYQM

SEQ ID NO: 109106 - protein, 9 aa, Homo sapiens
  misc_feature (1)..(9): Table A2; Target 6264; WT1; ENSG00000184937; HLA-C*16:02;
YSSDNLYQM

SEQ ID NO: 109107 - protein, 8 aa, Homo sapiens
  misc_feature (1)..(8): Table A2; Target 6265; WT1; ENSG00000184937; HLA-A*01:01;
YSVPPPVY

SEQ ID NO: 109108 - protein, 8 aa, Homo sapiens
  misc_feature (1)..(8): Table A2; Target 6266; WT1; ENSG00000184937; HLA-B*15:01;
YSVPPPVY

SEQ ID NO: 109109 - protein, 8 aa, Homo sapiens
  misc_feature (1)..(8): Table A2; Target 6267; WT1; ENSG00000184937; HLA-B*15:03;
YSVPPPVY

SEQ ID NO: 109110 - protein, 8 aa, Homo sapiens
  misc_feature (1)..(8): Table A2; Target 6268; WT1; ENSG00000184937; HLA-B*18:01;
YSVPPPVY

SEQ ID NO: 109111 - protein, 8 aa, Homo sapiens
  misc_feature (1)..(8): Table A2; Target 6269; WT1; ENSG00000184937; HLA-B*39:01;
YSVPPPVY

SEQ ID NO: 109112 - protein, 8 aa, Homo sapiens
  misc_feature (1)..(8): Table A2; Target 6270; WT1; ENSG00000184937; HLA-B*46:01;
YSVPPPVY

SEQ ID NO: 109113 - protein, 8 aa, Homo sapiens
  misc_feature (1)..(8): Table A2; Target 6271; WT1; ENSG00000184937; HLA-B*57:01;
YSVPPPVY

SEQ ID NO: 109114 - protein, 8 aa, Homo sapiens
  misc_feature (1)..(8): Table A2; Target 6272; WT1; ENSG00000184937; HLA-B*58:01;
YSVPPPVY

SEQ ID NO: 109115 - protein, 8 aa, Homo sapiens
  misc_feature (1)..(8): Table A2; Target 6273; WT1; ENSG00000184937; HLA-C*02:02;
YSVPPPVY

SEQ ID NO: 109116 - protein, 8 aa, Homo sapiens
  misc_feature (1)..(8): Table A2; Target 6274; WT1; ENSG00000184937; HLA-C*03:04;
YSVPPPVY

SEQ ID NO: 109117 - protein, 8 aa, Homo sapiens
  misc_feature (1)..(8): Table A2; Target 6275; WT1; ENSG00000184937; HLA-C*12:03;
YSVPPPVY

SEQ ID NO: 109118 - protein, 8 aa, Homo sapiens
  misc_feature (1)..(8): Table A2; Target 6276; WT1; ENSG00000184937; HLA-C*16:01;
YSVPPPVY

SEQ ID NO: 109119 - protein, 8 aa, Homo sapiens
  misc_feature (1)..(8): Table A2; Target 6277; WT1; ENSG00000184937; HLA-C*16:02;
YSVPPPVY

SEQ ID NO: 109120 - protein, 10 aa, Homo sapiens
  misc_feature (1)..(10): Table A2; Target 6278; KKLC-1; ENSG00000204019; HLA-A*02:03;
ALALVRPSSS

SEQ ID NO: 109121 - protein, 9 aa, Homo sapiens
  misc_feature (1)..(9): Table A2; Target 6279; KKLC-1; ENSG00000204019; HLA-A*32:01;
ALALVRPSS

SEQ ID NO: 109122 - protein, 9 aa, Homo sapiens
  misc_feature (1)..(9): Table A2; Target 6280; KKLC-1; ENSG00000204019; HLA-C*16:01;
ALALVRPSS

SEQ ID NO: 109123 - protein, 8 aa, Homo sapiens
  misc_feature (1)..(8): Table A2; Target 6281; KKLC-1; ENSG00000204019; HLA-A*29:02;
ALIVFWKY

SEQ ID NO: 109124 - protein, 10 aa, Homo sapiens
  misc_feature (1)..(10): Table A2; Target 6282; KKLC-1; ENSG00000204019; HLA-A*02:03;
ALVRPSSSGL

SEQ ID NO: 109125 - protein, 10 aa, Homo sapiens
  misc_feature (1)..(10): Table A2; Target 6283; KKLC-1; ENSG00000204019; HLA-A*25:01;
AVYDLSRDIL

SEQ ID NO: 109126 - protein, 10 aa, Homo sapiens
  misc_feature (1)..(10): Table A2; Target 6284; KKLC-1; ENSG00000204019; HLA-B*07:02;
AVYDLSRDIL

SEQ ID NO: 109127 - protein, 10 aa, Homo sapiens
  misc_feature (1)..(10): Table A2; Target 6285; KKLC-1; ENSG00000204019; HLA-C*12:03;
AVYDLSRDIL

SEQ ID NO: 109128 - protein, 9 aa, Homo sapiens
  misc_feature (1)..(9): Table A2; Target 6286; KKLC-1; ENSG00000204019; HLA-B*13:02;
AVYDLSRDI

SEQ ID NO: 109129 - protein, 9 aa, Homo sapiens
  misc_feature (1)..(9): Table A2; Target 6287; KKLC-1; ENSG00000204019; HLA-A*29:02;
CALIVFWKY

SEQ ID NO: 109130 - protein, 9 aa, Homo sapiens
  misc_feature (1)..(9): Table A2; Target 6288; KKLC-1; ENSG00000204019; HLA-B*57:01;
CALIVFWKY

SEQ ID NO: 109131 - protein, 10 aa, Homo sapiens
  misc_feature (1)..(10): Table A2; Target 6289; KKLC-1; ENSG00000204019; HLA-A*25:01;
DLSRDILNNF

SEQ ID NO: 109132 - protein, 11 aa, Homo sapiens
  misc_feature (1)..(11): Table A2; Target 6290; KKLC-1; ENSG00000204019; HLA-A*33:01;
DNNLAVYDLSR

SEQ ID NO: 109133 - protein, 11 aa, Homo sapiens
  misc_feature (1)..(11): Table A2; Target 6291; KKLC-1; ENSG00000204019; HLA-B*27:02;
DNNLAVYDLSR

SEQ ID NO: 109134 - protein, 9 aa, Homo sapiens
  misc_feature (1)..(9): Table A2; Target 6292; KKLC-1; ENSG00000204019; HLA-B*38:01;
EHTLLSKGF

SEQ ID NO: 109135 - protein, 9 aa, Homo sapiens
  misc_feature (1)..(9): Table A2; Target 6293; KKLC-1; ENSG00000204019; HLA-B*44:02;
EHTLLSKGF

SEQ ID NO: 109136 - protein, 9 aa, Homo sapiens
  misc_feature (1)..(9): Table A2; Target 6294; KKLC-1; ENSG00000204019; HLA-C*07:01;
EHTLLSKGF

SEQ ID NO: 109137 - protein, 11 aa, Homo sapiens
  misc_feature (1)..(11): Table A2; Target 6295; KKLC-1; ENSG00000204019; HLA-C*07:01;
ELEHTLLSKGF

SEQ ID NO: 109138 - protein, 9 aa, Homo sapiens
  misc_feature (1)..(9): Table A2; Target 6296; KKLC-1; ENSG00000204019; HLA-A*01:01;
ELEHTLLSK

SEQ ID NO: 109139 - protein, 9 aa, Homo sapiens
  misc_feature (1)..(9): Table A2; Target 6297; KKLC-1; ENSG00000204019; HLA-A*33:01;
ELEHTLLSK

SEQ ID NO: 109140 - protein, 9 aa, Homo sapiens
  misc_feature (1)..(9): Table A2; Target 6298; KKLC-1; ENSG00000204019; HLA-A*02:03;
EMSSNSTAL

SEQ ID NO: 109141 - protein, 9 aa, Homo sapiens
  misc_feature (1)..(9): Table A2; Target 6299; KKLC-1; ENSG00000204019; HLA-A*25:01;
EMSSNSTAL

SEQ ID NO: 109142 - protein, 9 aa, Homo sapiens
  misc_feature (1)..(9): Table A2; Target 6300; KKLC-1; ENSG00000204019; HLA-A*26:01;
EMSSNSTAL

SEQ ID NO: 109143 - protein, 9 aa, Homo sapiens
  misc_feature (1)..(9): Table A2; Target 6301; KKLC-1; ENSG00000204019; HLA-A*32:01;
EMSSNSTAL

SEQ ID NO: 109144 - protein, 9 aa, Homo sapiens
  misc_feature (1)..(9): Table A2; Target 6302; KKLC-1; ENSG00000204019; HLA-A*33:03;
EMSSNSTAL

SEQ ID NO: 109145 - protein, 9 aa, Homo sapiens
  misc_feature (1)..(9): Table A2; Target 6303; KKLC-1; ENSG00000204019; HLA-B*07:02;
EMSSNSTAL

SEQ ID NO: 109146 - protein, 9 aa, Homo sapiens
  misc_feature (1)..(9): Table A2; Target 6304; KKLC-1; ENSG00000204019; HLA-B*08:01;
EMSSNSTAL

SEQ ID NO: 109147 - protein, 9 aa, Homo sapiens
  misc_feature (1)..(9): Table A2; Target 6305; KKLC-1; ENSG00000204019; HLA-B*27:05;
EMSSNSTAL

SEQ ID NO: 109148 - protein, 9 aa, Homo sapiens
  misc_feature (1)..(9): Table A2; Target 6306; KKLC-1; ENSG00000204019; HLA-B*35:03;
EMSSNSTAL

SEQ ID NO: 109149 - protein, 9 aa, Homo sapiens
  misc_feature (1)..(9): Table A2; Target 6307; KKLC-1; ENSG00000204019; HLA-B*38:01;
EMSSNSTAL

SEQ ID NO: 109150 - protein, 9 aa, Homo sapiens
  misc_feature (1)..(9): Table A2; Target 6308; KKLC-1; ENSG00000204019; HLA-B*39:01;
EMSSNSTAL

SEQ ID NO: 109151 - protein, 9 aa, Homo sapiens
  misc_feature (1)..(9): Table A2; Target 6309; KKLC-1; ENSG00000204019; HLA-B*55:01;
EMSSNSTAL

SEQ ID NO: 109152 - protein, 9 aa, Homo sapiens
  misc_feature (1)..(9): Table A2; Target 6310; KKLC-1; ENSG00000204019; HLA-C*01:02;
EMSSNSTAL

SEQ ID NO: 109153 - protein, 9 aa, Homo sapiens
  misc_feature (1)..(9): Table A2; Target 6311; KKLC-1; ENSG00000204019; HLA-C*07:02;
EMSSNSTAL

SEQ ID NO: 109154 - protein, 9 aa, Homo sapiens
  misc_feature (1)..(9): Table A2; Target 6312; KKLC-1; ENSG00000204019; HLA-C*07:04;
EMSSNSTAL

SEQ ID NO: 109155 - protein, 9 aa, Homo sapiens
  misc_feature (1)..(9): Table A2; Target 6313; KKLC-1; ENSG00000204019; HLA-C*14:02;
EMSSNSTAL

SEQ ID NO: 109156 - protein, 9 aa, Homo sapiens
  misc_feature (1)..(9): Table A2; Target 6314; KKLC-1; ENSG00000204019; HLA-B*54:01;
FPHSIARQK

SEQ ID NO: 109157 - protein, 8 aa, Homo sapiens
  misc_feature (1)..(8): Table A2; Target 6315; KKLC-1; ENSG00000204019; HLA-B*07:02;
FQRNTGEM

SEQ ID NO: 109158 - protein, 8 aa, Homo sapiens
  misc_feature (1)..(8): Table A2; Target 6316; KKLC-1; ENSG00000204019; HLA-B*15:01;
FQRNTGEM

SEQ ID NO: 109159 - protein, 8 aa, Homo sapiens
  misc_feature (1)..(8): Table A2; Target 6317; KKLC-1; ENSG00000204019; HLA-B*15:03;
FQRNTGEM

SEQ ID NO: 109160 - protein, 8 aa, Homo sapiens
  misc_feature (1)..(8): Table A2; Target 6318; KKLC-1; ENSG00000204019; HLA-B*40:02;
FQRNTGEM

SEQ ID NO: 109161 - protein, 8 aa, Homo sapiens
  misc_feature (1)..(8): Table A2; Target 6319; KKLC-1; ENSG00000204019; HLA-B*46:01;
FQRNTGEM

SEQ ID NO: 109162 - protein, 8 aa, Homo sapiens
  misc_feature (1)..(8): Table A2; Target 6320; KKLC-1; ENSG00000204019; HLA-C*03:03;
FQRNTGEM

SEQ ID NO: 109163 - protein, 8 aa, Homo sapiens
  misc_feature (1)..(8): Table A2; Target 6321; KKLC-1; ENSG00000204019; HLA-C*03:04;
FQRNTGEM

SEQ ID NO: 109164 - protein, 8 aa, Homo sapiens
  misc_feature (1)..(8): Table A2; Target 6322; KKLC-1; ENSG00000204019; HLA-C*05:01;
FQRNTGEM

SEQ ID NO: 109165 - protein, 8 aa, Homo sapiens
  misc_feature (1)..(8): Table A2; Target 6323; KKLC-1; ENSG00000204019; HLA-C*07:04;
FQRNTGEM

SEQ ID NO: 109166 - protein, 8 aa, Homo sapiens
  misc_feature (1)..(8): Table A2; Target 6324; KKLC-1; ENSG00000204019; HLA-C*12:03;
FQRNTGEM

SEQ ID NO: 109167 - protein, 8 aa, Homo sapiens
  misc_feature (1)..(8): Table A2; Target 6325; KKLC-1; ENSG00000204019; HLA-C*14:02;
FQRNTGEM

SEQ ID NO: 109168 - protein, 8 aa, Homo sapiens
  misc_feature (1)..(8): Table A2; Target 6326; KKLC-1; ENSG00000204019; HLA-C*16:01;
FQRNTGEM

SEQ ID NO: 109169 - protein, 10 aa, Homo sapiens
  misc_feature (1)..(10): Table A2; Target 6327; KKLC-1; ENSG00000204019; HLA-A*24:02;
FYLLLASSIL

SEQ ID NO: 109170 - protein, 9 aa, Homo sapiens
  misc_feature (1)..(9): Table A2; Target 6328; KKLC-1; ENSG00000204019; HLA-A*23:01;
FYLLLASSI

SEQ ID NO: 109171 - protein, 9 aa, Homo sapiens
  misc_feature (1)..(9): Table A2; Target 6329; KKLC-1; ENSG00000204019; HLA-A*24:02;
FYLLLASSI

SEQ ID NO: 109172 - protein, 9 aa, Homo sapiens
  misc_feature (1)..(9): Table A2; Target 6330; KKLC-1; ENSG00000204019; HLA-C*14:02;
FYLLLASSI

SEQ ID NO: 109173 - protein, 9 aa, Homo sapiens
  misc_feature (1)..(9): Table A2; Target 6331; KKLC-1; ENSG00000204019; HLA-C*16:02;
GASPHRKST

SEQ ID NO: 109174 - protein, 11 aa, Homo sapiens
  misc_feature (1)..(11): Table A2; Target 6332; KKLC-1; ENSG00000204019; HLA-A*30:01;
GEMSSNSTALA

SEQ ID NO: 109175 - protein, 11 aa, Homo sapiens
  misc_feature (1)..(11): Table A2; Target 6333; KKLC-1; ENSG00000204019; HLA-B*40:01;
GEMSSNSTALA

SEQ ID NO: 109176 - protein, 11 aa, Homo sapiens
  misc_feature (1)..(11): Table A2; Target 6334; KKLC-1; ENSG00000204019; HLA-B*49:01;
GEMSSNSTALA

SEQ ID NO: 109177 - protein, 10 aa, Homo sapiens
  misc_feature (1)..(10): Table A2; Target 6335; KKLC-1; ENSG00000204019; HLA-A*30:01;
GEMSSNSTAL

SEQ ID NO: 109178 - protein, 10 aa, Homo sapiens
  misc_feature (1)..(10): Table A2; Target 6336; KKLC-1; ENSG00000204019; HLA-B*15:01;
GEMSSNSTAL

SEQ ID NO: 109179 - protein, 10 aa, Homo sapiens
  misc_feature (1)..(10): Table A2; Target 6337; KKLC-1; ENSG00000204019; HLA-B*15:03;
GEMSSNSTAL

SEQ ID NO: 109180 - protein, 10 aa, Homo sapiens
  misc_feature (1)..(10): Table A2; Target 6338; KKLC-1; ENSG00000204019; HLA-B*27:02;
GEMSSNSTAL

SEQ ID NO: 109181 - protein, 10 aa, Homo sapiens
  misc_feature (1)..(10): Table A2; Target 6339; KKLC-1; ENSG00000204019; HLA-B*27:05;
GEMSSNSTAL

SEQ ID NO: 109182 - protein, 10 aa, Homo sapiens
  misc_feature (1)..(10): Table A2; Target 6340; KKLC-1; ENSG00000204019; HLA-B*38:01;
GEMSSNSTAL

SEQ ID NO: 109183 - protein, 10 aa, Homo sapiens
  misc_feature (1)..(10): Table A2; Target 6341; KKLC-1; ENSG00000204019; HLA-B*39:01;
GEMSSNSTAL

SEQ ID NO: 109184 - protein, 10 aa, Homo sapiens
  misc_feature (1)..(10): Table A2; Target 6342; KKLC-1; ENSG00000204019; HLA-B*40:01;
GEMSSNSTAL

SEQ ID NO: 109185 - protein, 10 aa, Homo sapiens
  misc_feature (1)..(10): Table A2; Target 6343; KKLC-1; ENSG00000204019; HLA-B*40:02;
GEMSSNSTAL

SEQ ID NO: 109186 - protein, 10 aa, Homo sapiens
  misc_feature (1)..(10): Table A2; Target 6344; KKLC-1; ENSG00000204019; HLA-B*44:02;
GEMSSNSTAL

SEQ ID NO: 109187 - protein, 10 aa, Homo sapiens
  misc_feature (1)..(10): Table A2; Target 6345; KKLC-1; ENSG00000204019; HLA-B*44:03;
GEMSSNSTAL

SEQ ID NO: 109188 - protein, 10 aa, Homo sapiens
  misc_feature (1)..(10): Table A2; Target 6346; KKLC-1; ENSG00000204019; HLA-B*49:01;
GEMSSNSTAL

SEQ ID NO: 109189 - protein, 10 aa, Homo sapiens
  misc_feature (1)..(10): Table A2; Target 6347; KKLC-1; ENSG00000204019; HLA-C*16:04;
GEMSSNSTAL

SEQ ID NO: 109190 - protein, 9 aa, Homo sapiens
  misc_feature (1)..(9): Table A2; Target 6348; KKLC-1; ENSG00000204019; HLA-A*30:01;
GEMSSNSTA

SEQ ID NO: 109191 - protein, 9 aa, Homo sapiens
  misc_feature (1)..(9): Table A2; Target 6349; KKLC-1; ENSG00000204019; HLA-B*40:01;
GEMSSNSTA

SEQ ID NO: 109192 - protein, 9 aa, Homo sapiens
  misc_feature (1)..(9): Table A2; Target 6350; KKLC-1; ENSG00000204019; HLA-B*40:02;
GEMSSNSTA

SEQ ID NO: 109193 - protein, 9 aa, Homo sapiens
  misc_feature (1)..(9): Table A2; Target 6351; KKLC-1; ENSG00000204019; HLA-B*49:01;
GEMSSNSTA

SEQ ID NO: 109194 - protein, 11 aa, Homo sapiens
  misc_feature (1)..(11): Table A2; Target 6352; KKLC-1; ENSG00000204019; HLA-A*02:01;
GLINSNTDNNL

SEQ ID NO: 109195 - protein, 11 aa, Homo sapiens
  misc_feature (1)..(11): Table A2; Target 6353; KKLC-1; ENSG00000204019; HLA-A*02:04;
GLINSNTDNNL

SEQ ID NO: 109196 - protein, 11 aa, Homo sapiens
  misc_feature (1)..(11): Table A2; Target 6354; KKLC-1; ENSG00000204019; HLA-B*27:05;
GLINSNTDNNL

SEQ ID NO: 109197 - protein, 9 aa, Homo sapiens
  misc_feature (1)..(9): Table A2; Target 6355; KKLC-1; ENSG00000204019; HLA-A*31:01;
HTLLSKGFR

SEQ ID NO: 109198 - protein, 9 aa, Homo sapiens
  misc_feature (1)..(9): Table A2; Target 6356; KKLC-1; ENSG00000204019; HLA-A*33:01;
HTLLSKGFR

SEQ ID NO: 109199 - protein, 9 aa, Homo sapiens
  misc_feature (1)..(9): Table A2; Target 6357; KKLC-1; ENSG00000204019; HLA-A*33:03;
HTLLSKGFR

SEQ ID NO: 109200 - protein, 8 aa, Homo sapiens
  misc_feature (1)..(8): Table A2; Target 6358; KKLC-1; ENSG00000204019; HLA-B*57:01;
HTLLSKGF

SEQ ID NO: 109201 - protein, 11 aa, Homo sapiens
  misc_feature (1)..(11): Table A2; Target 6359; KKLC-1; ENSG00000204019; HLA-A*03:01;
ILNNFPHSIAR

SEQ ID NO: 109202 - protein, 11 aa, Homo sapiens
  misc_feature (1)..(11): Table A2; Target 6360; KKLC-1; ENSG00000204019; HLA-A*31:01;
ILNNFPHSIAR

SEQ ID NO: 109203 - protein, 11 aa, Homo sapiens
  misc_feature (1)..(11): Table A2; Target 6361; KKLC-1; ENSG00000204019; HLA-A*33:01;
ILNNFPHSIAR

SEQ ID NO: 109204 - protein, 11 aa, Homo sapiens
  misc_feature (1)..(11): Table A2; Target 6362; KKLC-1; ENSG00000204019; HLA-A*33:03;
ILNNFPHSIAR

SEQ ID NO: 109205 - protein, 10 aa, Homo sapiens
  misc_feature (1)..(10): Table A2; Target 6363; KKLC-1; ENSG00000204019; HLA-A*02:03;
ILNNFPHSIA

SEQ ID NO: 109206 - protein, 9 aa, Homo sapiens
  misc_feature (1)..(9): Table A2; Target 6364; KKLC-1; ENSG00000204019; HLA-A*02:01;
ILNNFPHSI

SEQ ID NO: 109207 - protein, 9 aa, Homo sapiens
  misc_feature (1)..(9): Table A2; Target 6365; KKLC-1; ENSG00000204019; HLA-A*02:03;
ILNNFPHSI

SEQ ID NO: 109208 - protein, 9 aa, Homo sapiens
  misc_feature (1)..(9): Table A2; Target 6366; KKLC-1; ENSG00000204019; HLA-A*02:04;
ILNNFPHSI

SEQ ID NO: 109209 - protein, 9 aa, Homo sapiens
  misc_feature (1)..(9): Table A2; Target 6367; KKLC-1; ENSG00000204019; HLA-A*02:07;
ILNNFPHSI

SEQ ID NO: 109210 - protein, 9 aa, Homo sapiens
  misc_feature (1)..(9): Table A2; Target 6368; KKLC-1; ENSG00000204019; HLA-A*23:01;
ILNNFPHSI

SEQ ID NO: 109211 - protein, 9 aa, Homo sapiens
  misc_feature (1)..(9): Table A2; Target 6369; KKLC-1; ENSG00000204019; HLA-A*24:02;
ILNNFPHSI

SEQ ID NO: 109212 - protein, 9 aa, Homo sapiens
  misc_feature (1)..(9): Table A2; Target 6370; KKLC-1; ENSG00000204019; HLA-A*30:01;
ILNNFPHSI

SEQ ID NO: 109213 - protein, 9 aa, Homo sapiens
  misc_feature (1)..(9): Table A2; Target 6371; KKLC-1; ENSG00000204019; HLA-A*31:01;
ILNNFPHSI

SEQ ID NO: 109214 - protein, 9 aa, Homo sapiens
  misc_feature (1)..(9): Table A2; Target 6372; KKLC-1; ENSG00000204019; HLA-A*32:01;
ILNNFPHSI

SEQ ID NO: 109215 - protein, 9 aa, Homo sapiens
  misc_feature (1)..(9): Table A2; Target 6373; KKLC-1; ENSG00000204019; HLA-A*68:02;
ILNNFPHSI

SEQ ID NO: 109216 - protein, 9 aa, Homo sapiens
  misc_feature (1)..(9): Table A2; Target 6374; KKLC-1; ENSG00000204019; HLA-B*13:02;
ILNNFPHSI

SEQ ID NO: 109217 - protein, 9 aa, Homo sapiens
  misc_feature (1)..(9): Table A2; Target 6375; KKLC-1; ENSG00000204019; HLA-B*38:01;
ILNNFPHSI

SEQ ID NO: 109218 - protein, 9 aa, Homo sapiens
  misc_feature (1)..(9): Table A2; Target 6376; KKLC-1; ENSG00000204019; HLA-B*51:01;
ILNNFPHSI

SEQ ID NO: 109219 - protein, 9 aa, Homo sapiens
  misc_feature (1)..(9): Table A2; Target 6377; KKLC-1; ENSG00000204019; HLA-B*55:01;
ILNNFPHSI

SEQ ID NO: 109220 - protein, 9 aa, Homo sapiens
  misc_feature (1)..(9): Table A2; Target 6378; KKLC-1; ENSG00000204019; HLA-C*01:02;
ILNNFPHSI

SEQ ID NO: 109221 - protein, 9 aa, Homo sapiens
  misc_feature (1)..(9): Table A2; Target 6379; KKLC-1; ENSG00000204019; HLA-C*02:02;
ILNNFPHSI

SEQ ID NO: 109222 - protein, 9 aa, Homo sapiens
  misc_feature (1)..(9): Table A2; Target 6380; KKLC-1; ENSG00000204019; HLA-C*06:02;
ILNNFPHSI

SEQ ID NO: 109223 - protein, 9 aa, Homo sapiens
  misc_feature (1)..(9): Table A2; Target 6381; KKLC-1; ENSG00000204019; HLA-C*14:02;
ILNNFPHSI

SEQ ID NO: 109224 - protein, 9 aa, Homo sapiens
  misc_feature (1)..(9): Table A2; Target 6382; KKLC-1; ENSG00000204019; HLA-C*16:01;
ILNNFPHSI

SEQ ID NO: 109225 - protein, 9 aa, Homo sapiens
  misc_feature (1)..(9): Table A2; Target 6383; KKLC-1; ENSG00000204019; HLA-C*16:02;
ILNNFPHSI

SEQ ID NO: 109226 - protein, 9 aa, Homo sapiens
  misc_feature (1)..(9): Table A2; Target 6384; KKLC-1; ENSG00000204019; HLA-B*35:03;
INSNTDNNL

SEQ ID NO: 109227 - protein, 9 aa, Homo sapiens
  misc_feature (1)..(9): Table A2; Target 6385; KKLC-1; ENSG00000204019; HLA-B*39:01;
INSNTDNNL

SEQ ID NO: 109228 - protein, 10 aa, Homo sapiens
  misc_feature (1)..(10): Table A2; Target 6386; KKLC-1; ENSG00000204019; HLA-A*02:01;
KLVELEHTLL

SEQ ID NO: 109229 - protein, 10 aa, Homo sapiens
  misc_feature (1)..(10): Table A2; Target 6387; KKLC-1; ENSG00000204019; HLA-A*02:03;
KLVELEHTLL

SEQ ID NO: 109230 - protein, 10 aa, Homo sapiens
  misc_feature (1)..(10): Table A2; Target 6388; KKLC-1; ENSG00000204019; HLA-A*02:04;
KLVELEHTLL

SEQ ID NO: 109231 - protein, 10 aa, Homo sapiens
  misc_feature (1)..(10): Table A2; Target 6389; KKLC-1; ENSG00000204019; HLA-A*02:07;
KLVELEHTLL

SEQ ID NO: 109232 - protein, 9 aa, Homo sapiens
  misc_feature (1)..(9): Table A2; Target 6390; KKLC-1; ENSG00000204019; HLA-A*02:01;
KLVELEHTL

SEQ ID NO: 109233 - protein, 9 aa, Homo sapiens
  misc_feature (1)..(9): Table A2; Target 6391; KKLC-1; ENSG00000204019; HLA-A*02:03;
KLVELEHTL

SEQ ID NO: 109234 - protein, 9 aa, Homo sapiens
  misc_feature (1)..(9): Table A2; Target 6392; KKLC-1; ENSG00000204019; HLA-A*02:04;
KLVELEHTL

SEQ ID NO: 109235 - protein, 9 aa, Homo sapiens
  misc_feature (1)..(9): Table A2; Target 6393; KKLC-1; ENSG00000204019; HLA-A*02:07;
KLVELEHTL

SEQ ID NO: 109236 - protein, 9 aa, Homo sapiens
  misc_feature (1)..(9): Table A2; Target 6394; KKLC-1; ENSG00000204019; HLA-A*23:01;
KLVELEHTL

SEQ ID NO: 109237 - protein, 9 aa, Homo sapiens
  misc_feature (1)..(9): Table A2; Target 6395; KKLC-1; ENSG00000204019; HLA-A*24:02;
KLVELEHTL

SEQ ID NO: 109238 - protein, 9 aa, Homo sapiens
  misc_feature (1)..(9): Table A2; Target 6396; KKLC-1; ENSG00000204019; HLA-A*30:01;
KLVELEHTL

SEQ ID NO: 109239 - protein, 9 aa, Homo sapiens
  misc_feature (1)..(9): Table A2; Target 6397; KKLC-1; ENSG00000204019; HLA-A*32:01;
KLVELEHTL

SEQ ID NO: 109240 - protein, 9 aa, Homo sapiens
  misc_feature (1)..(9): Table A2; Target 6398; KKLC-1; ENSG00000204019; HLA-B*13:02;
KLVELEHTL

SEQ ID NO: 109241 - protein, 9 aa, Homo sapiens
  misc_feature (1)..(9): Table A2; Target 6399; KKLC-1; ENSG00000204019; HLA-B*15:01;
KLVELEHTL

SEQ ID NO: 109242 - protein, 9 aa, Homo sapiens
  misc_feature (1)..(9): Table A2; Target 6400; KKLC-1; ENSG00000204019; HLA-B*15:03;
KLVELEHTL

SEQ ID NO: 109243 - protein, 9 aa, Homo sapiens
  misc_feature (1)..(9): Table A2; Target 6401; KKLC-1; ENSG00000204019; HLA-B*38:01;
KLVELEHTL

SEQ ID NO: 109244 - protein, 9 aa, Homo sapiens
  misc_feature (1)..(9): Table A2; Target 6402; KKLC-1; ENSG00000204019; HLA-B*40:01;
KLVELEHTL

SEQ ID NO: 109245 - protein, 9 aa, Homo sapiens
  misc_feature (1)..(9): Table A2; Target 6403; KKLC-1; ENSG00000204019; HLA-B*40:02;
KLVELEHTL

SEQ ID NO: 109246 - protein, 9 aa, Homo sapiens
  misc_feature (1)..(9): Table A2; Target 6404; KKLC-1; ENSG00000204019; HLA-B*55:01;
KLVELEHTL

SEQ ID NO: 109247 - protein, 9 aa, Homo sapiens
  misc_feature (1)..(9): Table A2; Target 6405; KKLC-1; ENSG00000204019; HLA-B*58:01;
KLVELEHTL

SEQ ID NO: 109248 - protein, 9 aa, Homo sapiens
  misc_feature (1)..(9): Table A2; Target 6406; KKLC-1; ENSG00000204019; HLA-C*02:02;
KLVELEHTL

SEQ ID NO: 109249 - protein, 9 aa, Homo sapiens
  misc_feature (1)..(9): Table A2; Target 6407; KKLC-1; ENSG00000204019; HLA-C*06:02;
KLVELEHTL

SEQ ID NO: 109250 - protein, 9 aa, Homo sapiens
  misc_feature (1)..(9): Table A2; Target 6408; KKLC-1; ENSG00000204019; HLA-C*07:04;
KLVELEHTL

SEQ ID NO: 109251 - protein, 9 aa, Homo sapiens
  misc_feature (1)..(9): Table A2; Target 6409; KKLC-1; ENSG00000204019; HLA-C*16:02;
KLVELEHTL

SEQ ID NO: 109252 - protein, 9 aa, Homo sapiens
  misc_feature (1)..(9): Table A2; Target 6410; KKLC-1; ENSG00000204019; HLA-A*68:02;
LASSILCAL

SEQ ID NO: 109253 - protein, 9 aa, Homo sapiens
  misc_feature (1)..(9): Table A2; Target 6411; KKLC-1; ENSG00000204019; HLA-B*27:05;
LASSILCAL

SEQ ID NO: 109254 - protein, 9 aa, Homo sapiens
  misc_feature (1)..(9): Table A2; Target 6412; KKLC-1; ENSG00000204019; HLA-B*35:03;
LASSILCAL

SEQ ID NO: 109255 - protein, 9 aa, Homo sapiens
  misc_feature (1)..(9): Table A2; Target 6413; KKLC-1; ENSG00000204019; HLA-B*46:01;
LASSILCAL

SEQ ID NO: 109256 - protein, 9 aa, Homo sapiens
  misc_feature (1)..(9): Table A2; Target 6414; KKLC-1; ENSG00000204019; HLA-C*02:02;
LASSILCAL

SEQ ID NO: 109257 - protein, 9 aa, Homo sapiens
  misc_feature (1)..(9): Table A2; Target 6415; KKLC-1; ENSG00000204019; HLA-C*03:03;
LASSILCAL

SEQ ID NO: 109258 - protein, 9 aa, Homo sapiens
  misc_feature (1)..(9): Table A2; Target 6416; KKLC-1; ENSG00000204019; HLA-C*03:04;
LASSILCAL

SEQ ID NO: 109259 - protein, 9 aa, Homo sapiens
  misc_feature (1)..(9): Table A2; Target 6417; KKLC-1; ENSG00000204019; HLA-C*07:04;
LASSILCAL

SEQ ID NO: 109260 - protein, 9 aa, Homo sapiens
  misc_feature (1)..(9): Table A2; Target 6418; KKLC-1; ENSG00000204019; HLA-C*12:03;
LASSILCAL

SEQ ID NO: 109261 - protein, 9 aa, Homo sapiens
  misc_feature (1)..(9): Table A2; Target 6419; KKLC-1; ENSG00000204019; HLA-C*16:01;
LASSILCAL

SEQ ID NO: 109262 - protein, 9 aa, Homo sapiens
  misc_feature (1)..(9): Table A2; Target 6420; KKLC-1; ENSG00000204019; HLA-C*16:02;
LASSILCAL

SEQ ID NO: 109263 - protein, 8 aa, Homo sapiens
  misc_feature (1)..(8): Table A2; Target 6421; KKLC-1; ENSG00000204019; HLA-B*54:01;
LASSILCA

SEQ ID NO: 109264 - protein, 10 aa, Homo sapiens
  misc_feature (1)..(10): Table A2; Target 6422; KKLC-1; ENSG00000204019; HLA-B*44:02;
LEHTLLSKGF

SEQ ID NO: 109265 - protein, 10 aa, Homo sapiens
  misc_feature (1)..(10): Table A2; Target 6423; KKLC-1; ENSG00000204019; HLA-B*44:03;
LEHTLLSKGF

SEQ ID NO: 109266 - protein, 10 aa, Homo sapiens
  misc_feature (1)..(10): Table A2; Target 6424; KKLC-1; ENSG00000204019; HLA-B*27:05;
LINSNTDNNL

SEQ ID NO: 109267 - protein, 10 aa, Homo sapiens
  misc_feature (1)..(10): Table A2; Target 6425; KKLC-1; ENSG00000204019; HLA-A*02:03;
LLASSILCAL

SEQ ID NO: 109268 - protein, 10 aa, Homo sapiens
  misc_feature (1)..(10): Table A2; Target 6426; KKLC-1; ENSG00000204019; HLA-A*02:04;
LLASSILCAL

SEQ ID NO: 109269 - protein, 9 aa, Homo sapiens
  misc_feature (1)..(9): Table A2; Target 6427; KKLC-1; ENSG00000204019; HLA-A*02:01;
LLASSILCA

SEQ ID NO: 109270 - protein, 9 aa, Homo sapiens
  misc_feature (1)..(9): Table A2; Target 6428; KKLC-1; ENSG00000204019; HLA-A*02:03;
LLASSILCA

SEQ ID NO: 109271 - protein, 11 aa, Homo sapiens
  misc_feature (1)..(11): Table A2; Target 6429; KKLC-1; ENSG00000204019; HLA-A*02:01;
LLLASSILCAL

SEQ ID NO: 109272 - protein, 11 aa, Homo sapiens
  misc_feature (1)..(11): Table A2; Target 6430; KKLC-1; ENSG00000204019; HLA-A*02:04;
LLLASSILCAL

SEQ ID NO: 109273 - protein, 9 aa, Homo sapiens
  misc_feature (1)..(9): Table A2; Target 6431; KKLC-1; ENSG00000204019; HLA-A*02:01;
LLLASSILC

SEQ ID NO: 109274 - protein, 9 aa, Homo sapiens
  misc_feature (1)..(9): Table A2; Target 6432; KKLC-1; ENSG00000204019; HLA-A*23:01;
LSRDILNNF

SEQ ID NO: 109275 - protein, 9 aa, Homo sapiens
  misc_feature (1)..(9): Table A2; Target 6433; KKLC-1; ENSG00000204019; HLA-A*24:02;
LSRDILNNF

SEQ ID NO: 109276 - protein, 9 aa, Homo sapiens
  misc_feature (1)..(9): Table A2; Target 6434; KKLC-1; ENSG00000204019; HLA-A*32:01;
LSRDILNNF

SEQ ID NO: 109277 - protein, 9 aa, Homo sapiens
  misc_feature (1)..(9): Table A2; Target 6435; KKLC-1; ENSG00000204019; HLA-A*33:01;
LSRDILNNF

SEQ ID NO: 109278 - protein, 9 aa, Homo sapiens
  misc_feature (1)..(9): Table A2; Target 6436; KKLC-1; ENSG00000204019; HLA-A*33:03;
LSRDILNNF

SEQ ID NO: 109279 - protein, 9 aa, Homo sapiens
  misc_feature (1)..(9): Table A2; Target 6437; KKLC-1; ENSG00000204019; HLA-B*46:01;
LSRDILNNF

SEQ ID NO: 109280 - protein, 9 aa, Homo sapiens
  misc_feature (1)..(9): Table A2; Target 6438; KKLC-1; ENSG00000204019; HLA-B*57:01;
LSRDILNNF

SEQ ID NO: 109281 - protein, 9 aa, Homo sapiens
  misc_feature (1)..(9): Table A2; Target 6439; KKLC-1; ENSG00000204019; HLA-B*58:01;
LSRDILNNF

SEQ ID NO: 109282 - protein, 9 aa, Homo sapiens
  misc_feature (1)..(9): Table A2; Target 6440; KKLC-1; ENSG00000204019; HLA-C*02:02;
LSRDILNNF

SEQ ID NO: 109283 - protein, 9 aa, Homo sapiens
  misc_feature (1)..(9): Table A2; Target 6441; KKLC-1; ENSG00000204019; HLA-C*16:01;
LSRDILNNF

SEQ ID NO: 109284 - protein, 9 aa, Homo sapiens
  misc_feature (1)..(9): Table A2; Target 6442; KKLC-1; ENSG00000204019; HLA-A*01:01;
LVELEHTLL

SEQ ID NO: 109285 - protein, 9 aa, Homo sapiens
  misc_feature (1)..(9): Table A2; Target 6443; KKLC-1; ENSG00000204019; HLA-A*02:07;
LVELEHTLL

SEQ ID NO: 109286 - protein, 9 aa, Homo sapiens
  misc_feature (1)..(9): Table A2; Target 6444; KKLC-1; ENSG00000204019; HLA-B*38:01;
LVELEHTLL

SEQ ID NO: 109287 - protein, 9 aa, Homo sapiens
  misc_feature (1)..(9): Table A2; Target 6445; KKLC-1; ENSG00000204019; HLA-C*05:01;
LVELEHTLL

SEQ ID NO: 109288 - protein, 9 aa, Homo sapiens
  misc_feature (1)..(9): Table A2; Target 6446; KKLC-1; ENSG00000204019; HLA-C*07:01;
LVELEHTLL

SEQ ID NO: 109289 - protein, 8 aa, Homo sapiens
  misc_feature (1)..(8): Table A2; Target 6447; KKLC-1; ENSG00000204019; HLA-C*05:01;
LVELEHTL

SEQ ID NO: 109290 - protein, 8 aa, Homo sapiens
  misc_feature (1)..(8): Table A2; Target 6448; KKLC-1; ENSG00000204019; HLA-C*07:04;
LVELEHTL

SEQ ID NO: 109291 - protein, 10 aa, Homo sapiens
  misc_feature (1)..(10): Table A2; Target 6449; KKLC-1; ENSG00000204019; HLA-A*03:02;
LVNLSMVENK

SEQ ID NO: 109292 - protein, 10 aa, Homo sapiens
  misc_feature (1)..(10): Table A2; Target 6450; KKLC-1; ENSG00000204019; HLA-B*27:02;
LVNLSMVENK

SEQ ID NO: 109293 - protein, 10 aa, Homo sapiens
  misc_feature (1)..(10): Table A2; Target 6451; KKLC-1; ENSG00000204019; HLA-C*07:02;
LVRPSSSGLI

SEQ ID NO: 109294 - protein, 9 aa, Homo sapiens
  misc_feature (1)..(9): Table A2; Target 6452; KKLC-1; ENSG00000204019; HLA-A*02:03;
LVRPSSSGL

SEQ ID NO: 109295 - protein, 9 aa, Homo sapiens
  misc_feature (1)..(9): Table A2; Target 6453; KKLC-1; ENSG00000204019; HLA-A*32:01;
LVRPSSSGL

SEQ ID NO: 109296 - protein, 9 aa, Homo sapiens
  misc_feature (1)..(9): Table A2; Target 6454; KKLC-1; ENSG00000204019; HLA-B*07:02;
LVRPSSSGL

SEQ ID NO: 109297 - protein, 9 aa, Homo sapiens
  misc_feature (1)..(9): Table A2; Target 6455; KKLC-1; ENSG00000204019; HLA-B*08:01;
LVRPSSSGL

SEQ ID NO: 109298 - protein, 9 aa, Homo sapiens
  misc_feature (1)..(9): Table A2; Target 6456; KKLC-1; ENSG00000204019; HLA-B*15:01;
LVRPSSSGL

SEQ ID NO: 109299 - protein, 9 aa, Homo sapiens
  misc_feature (1)..(9): Table A2; Target 6457; KKLC-1; ENSG00000204019; HLA-B*40:02;
LVRPSSSGL

SEQ ID NO: 109300 - protein, 9 aa, Homo sapiens
  misc_feature (1)..(9): Table A2; Target 6458; KKLC-1; ENSG00000204019; HLA-B*46:01;
LVRPSSSGL

SEQ ID NO: 109301 - protein, 9 aa, Homo sapiens
  misc_feature (1)..(9): Table A2; Target 6459; KKLC-1; ENSG00000204019; HLA-C*01:02;
LVRPSSSGL

SEQ ID NO: 109302 - protein, 9 aa, Homo sapiens
  misc_feature (1)..(9): Table A2; Target 6460; KKLC-1; ENSG00000204019; HLA-C*03:03;
LVRPSSSGL

SEQ ID NO: 109303 - protein, 9 aa, Homo sapiens
  misc_feature (1)..(9): Table A2; Target 6461; KKLC-1; ENSG00000204019; HLA-C*03:04;
LVRPSSSGL

SEQ ID NO: 109304 - protein, 9 aa, Homo sapiens
  misc_feature (1)..(9): Table A2; Target 6462; KKLC-1; ENSG00000204019; HLA-C*07:02;
LVRPSSSGL

SEQ ID NO: 109305 - protein, 9 aa, Homo sapiens
  misc_feature (1)..(9): Table A2; Target 6463; KKLC-1; ENSG00000204019; HLA-C*07:04;
LVRPSSSGL

SEQ ID NO: 109306 - protein, 9 aa, Homo sapiens
  misc_feature (1)..(9): Table A2; Target 6464; KKLC-1; ENSG00000204019; HLA-C*14:02;
LVRPSSSGL

SEQ ID NO: 109307 - protein, 8 aa, Homo sapiens
  misc_feature (1)..(8): Table A2; Target 6465; KKLC-1; ENSG00000204019; HLA-C*01:02;
MSSNSTAL

SEQ ID NO: 109308 - protein, 8 aa, Homo sapiens
  misc_feature (1)..(8): Table A2; Target 6466; KKLC-1; ENSG00000204019; HLA-C*03:03;
MSSNSTAL

SEQ ID NO: 109309 - protein, 8 aa, Homo sapiens
  misc_feature (1)..(8): Table A2; Target 6467; KKLC-1; ENSG00000204019; HLA-C*03:04;
MSSNSTAL

SEQ ID NO: 109310 - protein, 8 aa, Homo sapiens
  misc_feature (1)..(8): Table A2; Target 6468; KKLC-1; ENSG00000204019; HLA-C*05:01;
MSSNSTAL

SEQ ID NO: 109311 - protein, 8 aa, Homo sapiens
  misc_feature (1)..(8): Table A2; Target 6469; KKLC-1; ENSG00000204019; HLA-C*07:04;
MSSNSTAL

SEQ ID NO: 109312 - protein, 8 aa, Homo sapiens
  misc_feature (1)..(8): Table A2; Target 6470; KKLC-1; ENSG00000204019; HLA-C*14:02;
MSSNSTAL

SEQ ID NO: 109313 - protein, 8 aa, Homo sapiens
  misc_feature (1)..(8): Table A2; Target 6471; KKLC-1; ENSG00000204019; HLA-C*16:01;
MSSNSTAL

SEQ ID NO: 109314 - protein, 9 aa, Homo sapiens
  misc_feature (1)..(9): Table A2; Target 6472; KKLC-1; ENSG00000204019; HLA-A*02:07;
MVENKLVEL

SEQ ID NO: 109315 - protein, 9 aa, Homo sapiens
  misc_feature (1)..(9): Table A2; Target 6473; KKLC-1; ENSG00000204019; HLA-A*68:02;
MVENKLVEL

SEQ ID NO: 109316 - protein, 9 aa, Homo sapiens
  misc_feature (1)..(9): Table A2; Target 6474; KKLC-1; ENSG00000204019; HLA-B*08:01;
MVENKLVEL

SEQ ID NO: 109317 - protein, 9 aa, Homo sapiens
  misc_feature (1)..(9): Table A2; Target 6475; KKLC-1; ENSG00000204019; HLA-B*35:03;
MVENKLVEL

SEQ ID NO: 109318 - protein, 9 aa, Homo sapiens
  misc_feature (1)..(9): Table A2; Target 6476; KKLC-1; ENSG00000204019; HLA-B*38:01;
MVENKLVEL

SEQ ID NO: 109319 - protein, 9 aa, Homo sapiens
  misc_feature (1)..(9): Table A2; Target 6477; KKLC-1; ENSG00000204019; HLA-B*55:01;
MVENKLVEL

SEQ ID NO: 109320 - protein, 9 aa, Homo sapiens
  misc_feature (1)..(9): Table A2; Target 6478; KKLC-1; ENSG00000204019; HLA-C*01:02;
MVENKLVEL

SEQ ID NO: 109321 - protein, 9 aa, Homo sapiens
  misc_feature (1)..(9): Table A2; Target 6479; KKLC-1; ENSG00000204019; HLA-C*03:04;
MVENKLVEL

SEQ ID NO: 109322 - protein, 9 aa, Homo sapiens
  misc_feature (1)..(9): Table A2; Target 6480; KKLC-1; ENSG00000204019; HLA-C*05:01;
MVENKLVEL

SEQ ID NO: 109323 - protein, 9 aa, Homo sapiens
  misc_feature (1)..(9): Table A2; Target 6481; KKLC-1; ENSG00000204019; HLA-C*07:04;
MVENKLVEL

SEQ ID NO: 109324 - protein, 9 aa, Homo sapiens
  misc_feature (1)..(9): Table A2; Target 6482; KKLC-1; ENSG00000204019; HLA-A*02:04;
NLSMVENKL

SEQ ID NO: 109325 - protein, 9 aa, Homo sapiens
  misc_feature (1)..(9): Table A2; Target 6483; KKLC-1; ENSG00000204019; HLA-A*31:01;
NNFPHSIAR

SEQ ID NO: 109326 - protein, 9 aa, Homo sapiens
  misc_feature (1)..(9): Table A2; Target 6484; KKLC-1; ENSG00000204019; HLA-A*33:01;
NNFPHSIAR

SEQ ID NO: 109327 - protein, 9 aa, Homo sapiens
  misc_feature (1)..(9): Table A2; Target 6485; KKLC-1; ENSG00000204019; HLA-A*33:03;
NNFPHSIAR

SEQ ID NO: 109328 - protein, 9 aa, Homo sapiens
  misc_feature (1)..(9): Table A2; Target 6486; KKLC-1; ENSG00000204019; HLA-A*68:01;
NNFPHSIAR

SEQ ID NO: 109329 - protein, 9 aa, Homo sapiens
  misc_feature (1)..(9): Table A2; Target 6487; KKLC-1; ENSG00000204019; HLA-A*68:02;
NNFPHSIAR

SEQ ID NO: 109330 - protein, 9 aa, Homo sapiens
  misc_feature (1)..(9): Table A2; Target 6488; KKLC-1; ENSG00000204019; HLA-C*07:06;
NNFPHSIAR

SEQ ID NO: 109331 - protein, 11 aa, Homo sapiens
  misc_feature (1)..(11): Table A2; Target 6489; KKLC-1; ENSG00000204019; HLA-A*01:01;
NSNTDNNLAVY

SEQ ID NO: 109332 - protein, 11 aa, Homo sapiens
  misc_feature (1)..(11): Table A2; Target 6490; KKLC-1; ENSG00000204019; HLA-A*30:02;
NSNTDNNLAVY

SEQ ID NO: 109333 - protein, 9 aa, Homo sapiens
  misc_feature (1)..(9): Table A2; Target 6491; KKLC-1; ENSG00000204019; HLA-A*29:02;
NSTALALVR

SEQ ID NO: 109334 - protein, 9 aa, Homo sapiens
  misc_feature (1)..(9): Table A2; Target 6492; KKLC-1; ENSG00000204019; HLA-A*33:01;
NSTALALVR

SEQ ID NO: 109335 - protein, 9 aa, Homo sapiens
  misc_feature (1)..(9): Table A2; Target 6493; KKLC-1; ENSG00000204019; HLA-A*33:03;
NSTALALVR

SEQ ID NO: 109336 - protein, 9 aa, Homo sapiens
  misc_feature (1)..(9): Table A2; Target 6494; KKLC-1; ENSG00000204019; HLA-A*68:01;
NSTALALVR

SEQ ID NO: 109337 - protein, 9 aa, Homo sapiens
  misc_feature (1)..(9): Table A2; Target 6495; KKLC-1; ENSG00000204019; HLA-B*27:02;
NSTALALVR

SEQ ID NO: 109338 - protein, 9 aa, Homo sapiens
  misc_feature (1)..(9): Table A2; Target 6496; KKLC-1; ENSG00000204019; HLA-C*07:06;
NSTALALVR

SEQ ID NO: 109339 - protein, 11 aa, Homo sapiens
  misc_feature (1)..(11): Table A2; Target 6497; KKLC-1; ENSG00000204019; HLA-B*27:05;
NTDNNLAVYDL

SEQ ID NO: 109340 - protein, 11 aa, Homo sapiens
  misc_feature (1)..(11): Table A2; Target 6498; KKLC-1; ENSG00000204019; HLA-B*39:01;
NTDNNLAVYDL

SEQ ID NO: 109341 - protein, 11 aa, Homo sapiens
  misc_feature (1)..(11): Table A2; Target 6499; KKLC-1; ENSG00000204019; HLA-C*04:01;
NTDNNLAVYDL

SEQ ID NO: 109342 - protein, 9 aa, Homo sapiens
  misc_feature (1)..(9): Table A2; Target 6500; KKLC-1; ENSG00000204019; HLA-A*01:01;
NTDNNLAVY

SEQ ID NO: 109343 - protein, 9 aa, Homo sapiens
  misc_feature (1)..(9): Table A2; Target 6501; KKLC-1; ENSG00000204019; HLA-A*25:01;
NTDNNLAVY

SEQ ID NO: 109344 - protein, 9 aa, Homo sapiens
  misc_feature (1)..(9): Table A2; Target 6502; KKLC-1; ENSG00000204019; HLA-A*26:01;
NTDNNLAVY

SEQ ID NO: 109345 - protein, 9 aa, Homo sapiens
  misc_feature (1)..(9): Table A2; Target 6503; KKLC-1; ENSG00000204019; HLA-A*29:02;
NTDNNLAVY

SEQ ID NO: 109346 - protein, 9 aa, Homo sapiens
  misc_feature (1)..(9): Table A2; Target 6504; KKLC-1; ENSG00000204019; HLA-A*30:02;
NTDNNLAVY

SEQ ID NO: 109347 - protein, 9 aa, Homo sapiens
  misc_feature (1)..(9): Table A2; Target 6505; KKLC-1; ENSG00000204019; HLA-A*32:01;
NTDNNLAVY

SEQ ID NO: 109348 - protein, 9 aa, Homo sapiens
  misc_feature (1)..(9): Table A2; Target 6506; KKLC-1; ENSG00000204019; HLA-B*18:01;
NTDNNLAVY

SEQ ID NO: 109349 - protein, 9 aa, Homo sapiens
  misc_feature (1)..(9): Table A2; Target 6507; KKLC-1; ENSG00000204019; HLA-B*27:05;
NTDNNLAVY

SEQ ID NO: 109350 - protein, 9 aa, Homo sapiens
  misc_feature (1)..(9): Table A2; Target 6508; KKLC-1; ENSG00000204019; HLA-B*35:01;
NTDNNLAVY

SEQ ID NO: 109351 - protein, 9 aa, Homo sapiens
  misc_feature (1)..(9): Table A2; Target 6509; KKLC-1; ENSG00000204019; HLA-B*39:01;
NTDNNLAVY

SEQ ID NO: 109352 - protein, 9 aa, Homo sapiens
  misc_feature (1)..(9): Table A2; Target 6510; KKLC-1; ENSG00000204019; HLA-B*55:01;
NTDNNLAVY

SEQ ID NO: 109353 - protein, 9 aa, Homo sapiens
  misc_feature (1)..(9): Table A2; Target 6511; KKLC-1; ENSG00000204019; HLA-C*03:03;
NTDNNLAVY

SEQ ID NO: 109354 - protein, 9 aa, Homo sapiens
  misc_feature (1)..(9): Table A2; Target 6512; KKLC-1; ENSG00000204019; HLA-C*04:01;
NTDNNLAVY

SEQ ID NO: 109355 - protein, 9 aa, Homo sapiens
  misc_feature (1)..(9): Table A2; Target 6513; KKLC-1; ENSG00000204019; HLA-C*05:01;
NTDNNLAVY

SEQ ID NO: 109356 - protein, 9 aa, Homo sapiens
  misc_feature (1)..(9): Table A2; Target 6514; KKLC-1; ENSG00000204019; HLA-C*07:01;
NTDNNLAVY

SEQ ID NO: 109357 - protein, 9 aa, Homo sapiens
  misc_feature (1)..(9): Table A2; Target 6515; KKLC-1; ENSG00000204019; HLA-C*07:04;
NTDNNLAVY

SEQ ID NO: 109358 - protein, 9 aa, Homo sapiens
  misc_feature (1)..(9): Table A2; Target 6516; KKLC-1; ENSG00000204019; HLA-C*07:06;
NTDNNLAVY

SEQ ID NO: 109359 - protein, 9 aa, Homo sapiens
  misc_feature (1)..(9): Table A2; Target 6517; KKLC-1; ENSG00000204019; HLA-C*16:02;
NTDNNLAVY

SEQ ID NO: 109360 - protein, 8 aa, Homo sapiens
  misc_feature (1)..(8): Table A2; Target 6518; KKLC-1; ENSG00000204019; HLA-A*01:01;
NTDNNLAV

SEQ ID NO: 109361 - protein, 8 aa, Homo sapiens
  misc_feature (1)..(8): Table A2; Target 6519; KKLC-1; ENSG00000204019; HLA-C*05:01;
NTDNNLAV

SEQ ID NO: 109362 - protein, 9 aa, Homo sapiens
  misc_feature (1)..(9): Table A2; Target 6520; KKLC-1; ENSG00000204019; HLA-C*14:02;
RFQRNTGEM

SEQ ID NO: 109363 - protein, 9 aa, Homo sapiens
  misc_feature (1)..(9): Table A2; Target 6521; KKLC-1; ENSG00000204019; HLA-A*02:01;
RILVNLSMV

SEQ ID NO: 109364 - protein, 9 aa, Homo sapiens
  misc_feature (1)..(9): Table A2; Target 6522; KKLC-1; ENSG00000204019; HLA-A*02:03;
RILVNLSMV

SEQ ID NO: 109365 - protein, 9 aa, Homo sapiens
  misc_feature (1)..(9): Table A2; Target 6523; KKLC-1; ENSG00000204019; HLA-A*02:04;
RILVNLSMV

SEQ ID NO: 109366 - protein, 9 aa, Homo sapiens
  misc_feature (1)..(9): Table A2; Target 6524; KKLC-1; ENSG00000204019; HLA-A*02:07;
RILVNLSMV

SEQ ID NO: 109367 - protein, 8 aa, Homo sapiens
  misc_feature (1)..(8): Table A2; Target 6525; KKLC-1; ENSG00000204019; HLA-C*07:02;
RPSSSGLI

SEQ ID NO: 109368 - protein, 9 aa, Homo sapiens
  misc_feature (1)..(9): Table A2; Target 6526; KKLC-1; ENSG00000204019; HLA-A*31:01;
RQKRILVNL

SEQ ID NO: 109369 - protein, 10 aa, Homo sapiens
  misc_feature (1)..(10): Table A2; Target 6527; KKLC-1; ENSG00000204019; HLA-A*02:01;
SMVENKLVEL

SEQ ID NO: 109370 - protein, 10 aa, Homo sapiens
  misc_feature (1)..(10): Table A2; Target 6528; KKLC-1; ENSG00000204019; HLA-A*02:03;
SMVENKLVEL

SEQ ID NO: 109371 - protein, 10 aa, Homo sapiens
  misc_feature (1)..(10): Table A2; Target 6529; KKLC-1; ENSG00000204019; HLA-A*02:04;
SMVENKLVEL

SEQ ID NO: 109372 - protein, 10 aa, Homo sapiens
  misc_feature (1)..(10): Table A2; Target 6530; KKLC-1; ENSG00000204019; HLA-A*02:07;
SMVENKLVEL

SEQ ID NO: 109373 - protein, 10 aa, Homo sapiens
  misc_feature (1)..(10): Table A2; Target 6531; KKLC-1; ENSG00000204019; HLA-B*46:01;
SMVENKLVEL

SEQ ID NO: 109374 - protein, 10 aa, Homo sapiens
  misc_feature (1)..(10): Table A2; Target 6532; KKLC-1; ENSG00000204019; HLA-B*55:01;
SMVENKLVEL

SEQ ID NO: 109375 - protein, 10 aa, Homo sapiens
  misc_feature (1)..(10): Table A2; Target 6533; KKLC-1; ENSG00000204019; HLA-A*68:01;
SNSTALALVR

SEQ ID NO: 109376 - protein, 10 aa, Homo sapiens
  misc_feature (1)..(10): Table A2; Target 6534; KKLC-1; ENSG00000204019; HLA-B*27:02;
SNSTALALVR

SEQ ID NO: 109377 - protein, 10 aa, Homo sapiens
  misc_feature (1)..(10): Table A2; Target 6535; KKLC-1; ENSG00000204019; HLA-C*07:06;
SNSTALALVR

SEQ ID NO: 109378 - protein, 10 aa, Homo sapiens
  misc_feature (1)..(10): Table A2; Target 6536; KKLC-1; ENSG00000204019; HLA-A*25:01;
SNTDNNLAVY

SEQ ID NO: 109379 - protein, 10 aa, Homo sapiens
  misc_feature (1)..(10): Table A2; Target 6537; KKLC-1; ENSG00000204019; HLA-A*26:01;
SNTDNNLAVY

SEQ ID NO: 109380 - protein, 10 aa, Homo sapiens
  misc_feature (1)..(10): Table A2; Target 6538; KKLC-1; ENSG00000204019; HLA-A*29:02;
SNTDNNLAVY

SEQ ID NO: 109381 - protein, 10 aa, Homo sapiens
  misc_feature (1)..(10): Table A2; Target 6539; KKLC-1; ENSG00000204019; HLA-A*30:02;
SNTDNNLAVY

SEQ ID NO: 109382 - protein, 9 aa, Homo sapiens
  misc_feature (1)..(9): Table A2; Target 6540; KKLC-1; ENSG00000204019; HLA-B*13:02;
SNTDNNLAV

SEQ ID NO: 109383 - protein, 11 aa, Homo sapiens
  misc_feature (1)..(11): Table A2; Target 6541; KKLC-1; ENSG00000204019; HLA-A*03:02;
SSNSTALALVR

SEQ ID NO: 109384 - protein, 11 aa, Homo sapiens
  misc_feature (1)..(11): Table A2; Target 6542; KKLC-1; ENSG00000204019; HLA-A*11:01;
SSNSTALALVR

SEQ ID NO: 109385 - protein, 11 aa, Homo sapiens
  misc_feature (1)..(11): Table A2; Target 6543; KKLC-1; ENSG00000204019; HLA-A*31:01;
SSNSTALALVR

SEQ ID NO: 109386 - protein, 11 aa, Homo sapiens
  misc_feature (1)..(11): Table A2; Target 6544; KKLC-1; ENSG00000204019; HLA-A*33:03;
SSNSTALALVR

SEQ ID NO: 109387 - protein, 11 aa, Homo sapiens
  misc_feature (1)..(11): Table A2; Target 6545; KKLC-1; ENSG00000204019; HLA-A*68:01;
SSNSTALALVR

SEQ ID NO: 109388 - protein, 11 aa, Homo sapiens
  misc_feature (1)..(11): Table A2; Target 6546; KKLC-1; ENSG00000204019; HLA-C*07:06;
SSNSTALALVR

SEQ ID NO: 109389 - protein, 9 aa, Homo sapiens
  misc_feature (1)..(9): Table A2; Target 6547; KKLC-1; ENSG00000204019; HLA-A*03:01;
SSNSTALAL

SEQ ID NO: 109390 - protein, 9 aa, Homo sapiens
  misc_feature (1)..(9): Table A2; Target 6548; KKLC-1; ENSG00000204019; HLA-B*07:02;
SSNSTALAL

SEQ ID NO: 109391 - protein, 9 aa, Homo sapiens
  misc_feature (1)..(9): Table A2; Target 6549; KKLC-1; ENSG00000204019; HLA-B*13:02;
SSNSTALAL

SEQ ID NO: 109392 - protein, 9 aa, Homo sapiens
  misc_feature (1)..(9): Table A2; Target 6550; KKLC-1; ENSG00000204019; HLA-B*35:03;
SSNSTALAL

SEQ ID NO: 109393 - protein, 9 aa, Homo sapiens
  misc_feature (1)..(9): Table A2; Target 6551; KKLC-1; ENSG00000204019; HLA-B*46:01;
SSNSTALAL

SEQ ID NO: 109394 - protein, 9 aa, Homo sapiens
  misc_feature (1)..(9): Table A2; Target 6552; KKLC-1; ENSG00000204019; HLA-B*58:01;
SSNSTALAL

SEQ ID NO: 109395 - protein, 9 aa, Homo sapiens
  misc_feature (1)..(9): Table A2; Target 6553; KKLC-1; ENSG00000204019; HLA-C*01:02;
SSNSTALAL

SEQ ID NO: 109396 - protein, 9 aa, Homo sapiens
  misc_feature (1)..(9): Table A2; Target 6554; KKLC-1; ENSG00000204019; HLA-C*03:03;
SSNSTALAL

SEQ ID NO: 109397 - protein, 9 aa, Homo sapiens
  misc_feature (1)..(9): Table A2; Target 6555; KKLC-1; ENSG00000204019; HLA-C*03:04;
SSNSTALAL

SEQ ID NO: 109398 - protein, 9 aa, Homo sapiens
  misc_feature (1)..(9): Table A2; Target 6556; KKLC-1; ENSG00000204019; HLA-C*07:02;
SSNSTALAL

SEQ ID NO: 109399 - protein, 9 aa, Homo sapiens
  misc_feature (1)..(9): Table A2; Target 6557; KKLC-1; ENSG00000204019; HLA-C*07:06;
SSNSTALAL

SEQ ID NO: 109400 - protein, 9 aa, Homo sapiens
  misc_feature (1)..(9): Table A2; Target 6558; KKLC-1; ENSG00000204019; HLA-C*14:02;
SSNSTALAL

SEQ ID NO: 109401 - protein, 9 aa, Homo sapiens
  misc_feature (1)..(9): Table A2; Target 6559; KKLC-1; ENSG00000204019; HLA-C*16:01;
SSNSTALAL

SEQ ID NO: 109402 - protein, 9 aa, Homo sapiens
  misc_feature (1)..(9): Table A2; Target 6560; KKLC-1; ENSG00000204019; HLA-C*16:02;
SSNSTALAL

SEQ ID NO: 109403 - protein, 9 aa, Homo sapiens
  misc_feature (1)..(9): Table A2; Target 6561; KKLC-1; ENSG00000204019; HLA-C*12:03;
SSSGLINSN

SEQ ID NO: 109404 - protein, 11 aa, Homo sapiens
  misc_feature (1)..(11): Table A2; Target 6562; KKLC-1; ENSG00000204019; HLA-C*06:02;
STALALVRPSS

SEQ ID NO: 109405 - protein, 10 aa, Homo sapiens
  misc_feature (1)..(10): Table A2; Target 6563; KKLC-1; ENSG00000204019; HLA-C*06:02;
STALALVRPS

SEQ ID NO: 109406 - protein, 10 aa, Homo sapiens
  misc_feature (1)..(10): Table A2; Target 6564; KKLC-1; ENSG00000204019; HLA-C*07:01;
STALALVRPS

SEQ ID NO: 109407 - protein, 10 aa, Homo sapiens
  misc_feature (1)..(10): Table A2; Target 6565; KKLC-1; ENSG00000204019; HLA-C*07:02;
STALALVRPS

SEQ ID NO: 109408 - protein, 9 aa, Homo sapiens
  misc_feature (1)..(9): Table A2; Target 6566; KKLC-1; ENSG00000204019; HLA-A*31:01;
TALALVRPS

SEQ ID NO: 109409 - protein, 9 aa, Homo sapiens
  misc_feature (1)..(9): Table A2; Target 6567; KKLC-1; ENSG00000204019; HLA-A*33:01;
TALALVRPS

SEQ ID NO: 109410 - protein, 9 aa, Homo sapiens
  misc_feature (1)..(9): Table A2; Target 6568; KKLC-1; ENSG00000204019; HLA-C*06:02;
TALALVRPS

SEQ ID NO: 109411 - protein, 9 aa, Homo sapiens
  misc_feature (1)..(9): Table A2; Target 6569; KKLC-1; ENSG00000204019; HLA-C*07:01;
TALALVRPS

SEQ ID NO: 109412 - protein, 9 aa, Homo sapiens
  misc_feature (1)..(9): Table A2; Target 6570; KKLC-1; ENSG00000204019; HLA-C*12:03;
TALALVRPS

SEQ ID NO: 109413 - protein, 8 aa, Homo sapiens
  misc_feature (1)..(8): Table A2; Target 6571; KKLC-1; ENSG00000204019; HLA-A*30:02;
TDNNLAVY

SEQ ID NO: 109414 - protein, 8 aa, Homo sapiens
  misc_feature (1)..(8): Table A2; Target 6572; KKLC-1; ENSG00000204019; HLA-B*18:01;
TDNNLAVY

SEQ ID NO: 109415 - protein, 8 aa, Homo sapiens
  misc_feature (1)..(8): Table A2; Target 6573; KKLC-1; ENSG00000204019; HLA-C*04:01;
TDNNLAVY

SEQ ID NO: 109416 - protein, 8 aa, Homo sapiens
  misc_feature (1)..(8): Table A2; Target 6574; KKLC-1; ENSG00000204019; HLA-C*07:01;
TDNNLAVY

SEQ ID NO: 109417 - protein, 8 aa, Homo sapiens
  misc_feature (1)..(8): Table A2; Target 6575; KKLC-1; ENSG00000204019; HLA-C*07:04;
TDNNLAVY

SEQ ID NO: 109418 - protein, 11 aa, Homo sapiens
  misc_feature (1)..(11): Table A2; Target 6576; KKLC-1; ENSG00000204019; HLA-B*35:03;
TGEMSSNSTAL

SEQ ID NO: 109419 - protein, 11 aa, Homo sapiens
  misc_feature (1)..(11): Table A2; Target 6577; KKLC-1; ENSG00000204019; HLA-B*40:01;
TGEMSSNSTAL

SEQ ID NO: 109420 - protein, 10 aa, Homo sapiens
  misc_feature (1)..(10): Table A2; Target 6578; KKLC-1; ENSG00000204019; HLA-A*02:03;
TLLSKGFRGA

SEQ ID NO: 109421 - protein, 9 aa, Homo sapiens
  misc_feature (1)..(9): Table A2; Target 6579; KKLC-1; ENSG00000204019; HLA-B*49:01;
VELEHTLLS

SEQ ID NO: 109422 - protein, 8 aa, Homo sapiens
  misc_feature (1)..(8): Table A2; Target 6580; KKLC-1; ENSG00000204019; HLA-A*23:01;
VELEHTLL

SEQ ID NO: 109423 - protein, 8 aa, Homo sapiens
  misc_feature (1)..(8): Table A2; Target 6581; KKLC-1; ENSG00000204019; HLA-A*30:01;
VELEHTLL

SEQ ID NO: 109424 - protein, 8 aa, Homo sapiens
  misc_feature (1)..(8): Table A2; Target 6582; KKLC-1; ENSG00000204019; HLA-B*08:01;
VELEHTLL

SEQ ID NO: 109425 - protein, 8 aa, Homo sapiens
  misc_feature (1)..(8): Table A2; Target 6583; KKLC-1; ENSG00000204019; HLA-B*18:01;
VELEHTLL

SEQ ID NO: 109426 - protein, 8 aa, Homo sapiens
  misc_feature (1)..(8): Table A2; Target 6584; KKLC-1; ENSG00000204019; HLA-B*37:01;
VELEHTLL

SEQ ID NO: 109427 - protein, 8 aa, Homo sapiens
  misc_feature (1)..(8): Table A2; Target 6585; KKLC-1; ENSG00000204019; HLA-B*40:01;
VELEHTLL

SEQ ID NO: 109428 - protein, 8 aa, Homo sapiens
  misc_feature (1)..(8): Table A2; Target 6586; KKLC-1; ENSG00000204019; HLA-B*40:02;
VELEHTLL

SEQ ID NO: 109429 - protein, 8 aa, Homo sapiens
  misc_feature (1)..(8): Table A2; Target 6587; KKLC-1; ENSG00000204019; HLA-B*49:01;
VELEHTLL

SEQ ID NO: 109430 - protein, 8 aa, Homo sapiens
  misc_feature (1)..(8): Table A2; Target 6588; KKLC-1; ENSG00000204019; HLA-C*04:01;
VELEHTLL

SEQ ID NO: 109431 - protein, 8 aa, Homo sapiens
  misc_feature (1)..(8): Table A2; Target 6589; KKLC-1; ENSG00000204019; HLA-C*07:01;
VELEHTLL

SEQ ID NO: 109432 - protein, 8 aa, Homo sapiens
  misc_feature (1)..(8): Table A2; Target 6590; KKLC-1; ENSG00000204019; HLA-A*30:01;
VENKLVEL

SEQ ID NO: 109433 - protein, 8 aa, Homo sapiens
  misc_feature (1)..(8): Table A2; Target 6591; KKLC-1; ENSG00000204019; HLA-B*18:01;
VENKLVEL

SEQ ID NO: 109434 - protein, 8 aa, Homo sapiens
  misc_feature (1)..(8): Table A2; Target 6592; KKLC-1; ENSG00000204019; HLA-B*37:01;
VENKLVEL

SEQ ID NO: 109435 - protein, 8 aa, Homo sapiens
  misc_feature (1)..(8): Table A2; Target 6593; KKLC-1; ENSG00000204019; HLA-B*40:01;
VENKLVEL

SEQ ID NO: 109436 - protein, 8 aa, Homo sapiens
  misc_feature (1)..(8): Table A2; Target 6594; KKLC-1; ENSG00000204019; HLA-B*40:02;
VENKLVEL

SEQ ID NO: 109437 - protein, 8 aa, Homo sapiens
  misc_feature (1)..(8): Table A2; Target 6595; KKLC-1; ENSG00000204019; HLA-B*49:01;
VENKLVEL

SEQ ID NO: 109438 - protein, 10 aa, Homo sapiens
  misc_feature (1)..(10): Table A2; Target 6596; KKLC-1; ENSG00000204019; HLA-A*23:01;
VNLSMVENKL

SEQ ID NO: 109439 - protein, 9 aa, Homo sapiens
  misc_feature (1)..(9): Table A2; Target 6597; KKLC-1; ENSG00000204019; HLA-B*27:02;
VNLSMVENK

SEQ ID NO: 109440 - protein, 10 aa, Homo sapiens
  misc_feature (1)..(10): Table A2; Target 6598; KKLC-1; ENSG00000204019; HLA-C*07:01;
VRPSSSGLIN

SEQ ID NO: 109441 - protein, 9 aa, Homo sapiens
  misc_feature (1)..(9): Table A2; Target 6599; KKLC-1; ENSG00000204019; HLA-C*06:02;
VRPSSSGLI

SEQ ID NO: 109442 - protein, 8 aa, Homo sapiens
  misc_feature (1)..(8): Table A2; Target 6600; KKLC-1; ENSG00000204019; HLA-C*01:02;
VRPSSSGL

SEQ ID NO: 109443 - protein, 8 aa, Homo sapiens
  misc_feature (1)..(8): Table A2; Target 6601; KKLC-1; ENSG00000204019; HLA-C*07:02;
VRPSSSGL

SEQ ID NO: 109444 - protein, 9 aa, Homo sapiens
  misc_feature (1)..(9): Table A2; Target 6602; KKLC-1; ENSG00000204019; HLA-A*23:01;
VYDLSRDIL

SEQ ID NO: 109445 - protein, 9 aa, Homo sapiens
  misc_feature (1)..(9): Table A2; Target 6603; KKLC-1; ENSG00000204019; HLA-A*24:02;
VYDLSRDIL

SEQ ID NO: 109446 - protein, 9 aa, Homo sapiens
  misc_feature (1)..(9): Table A2; Target 6604; KKLC-1; ENSG00000204019; HLA-B*35:01;
VYDLSRDIL

SEQ ID NO: 109447 - protein, 9 aa, Homo sapiens
  misc_feature (1)..(9): Table A2; Target 6605; KKLC-1; ENSG00000204019; HLA-B*35:03;
VYDLSRDIL

SEQ ID NO: 109448 - protein, 9 aa, Homo sapiens
  misc_feature (1)..(9): Table A2; Target 6606; KKLC-1; ENSG00000204019; HLA-B*55:01;
VYDLSRDIL

SEQ ID NO: 109449 - protein, 9 aa, Homo sapiens
  misc_feature (1)..(9): Table A2; Target 6607; KKLC-1; ENSG00000204019; HLA-C*04:01;
VYDLSRDIL

SEQ ID NO: 109450 - protein, 8 aa, Homo sapiens
  misc_feature (1)..(8): Table A2; Target 6608; KKLC-1; ENSG00000204019; HLA-B*35:03;
VYDLSRDI

SEQ ID NO: 109451 - protein, 8 aa, Homo sapiens
  misc_feature (1)..(8): Table A2; Target 6609; KKLC-1; ENSG00000204019; HLA-B*51:01;
VYDLSRDI

SEQ ID NO: 109452 - protein, 8 aa, Homo sapiens
  misc_feature (1)..(8): Table A2; Target 6610; KKLC-1; ENSG00000204019; HLA-C*04:01;
VYDLSRDI

SEQ ID NO: 109453 - protein, 8 aa, Homo sapiens
  misc_feature (1)..(8): Table A2; Target 6611; KKLC-1; ENSG00000204019; HLA-B*13:02;
YLLLASSI

SEQ ID NO: 109454 - protein, 8 aa, Homo sapiens
  misc_feature (1)..(8): Table A2; Target 6612; KKLC-1; ENSG00000204019; HLA-B*51:01;
YLLLASSI

SEQ ID NO: 109455 - protein, 9 aa, Homo sapiens
NTDNNLAVY

SEQ ID NO: 109456 - protein, 10 aa, Homo sapiens
AIFPGAVPAA

SEQ ID NO: 109457 - protein, 10 aa, Homo sapiens
ASSLPTTMNY

SEQ ID NO: 109458 - protein, 9 aa, Homo sapiens
LLASSILCA

SEQ ID NO: 109459 - protein, 9 aa, Homo sapiens
EVDPIGHVY

SEQ ID NO: 109460 - protein, 5 aa, Artificial Sequence
  Synthetic
GGGGS

SEQ ID NO: 109461 - protein, 50 aa, Artificial Sequence
  Synthetic
  misc_feature (6)..(50): "Gly Gly Gly Gly Ser" may or may not be present
GGGGSGGGGSGGGGSGGGGSGGGGSGGGGSGGGGSGGGGSGGGGSGGGGS

SEQ ID NO: 109462 - protein, 526 aa, Homo sapiens
MGWSCIILFLVATATGVHSDIQMTQSPSSLSASVGDRVTITCQASQDISNYLNWYQQKPGKAPKLLIYAASSLQSGVPSRFSGSGSGTDFTLTISSLQPEDFATYYCQQYYSYPFTFGPGTKVDIKGGGGSGGGGSGGGGSGGGGSQVQLVQSGAEVKKPGASVKVSCKASGYTFTNYYMHWVRQAPGQGLEWMGMINPSGGGTSYAQKFQGRVTMTRDTSTSTVYMELSSLRSEDTAVYYCARGNPWELRLDYWGQGTLVTVSSGGGGSQVQLQQSGAELARPGASVKMSCKASGYTFTRYTMHWVKQRPGQGLEWIGYINPSRGYTNYNQKFKDKATLTTDKSSSTAYMQLSSLTSEDSAVYYCARYYDDHYSLDYWGQGTTLTVSSVEGGSGGSGGSGGSGGVDQIVLTQSPAIMSASPGEKVTMTCSASSSVSYMNWYQQKSGTSPKRWIYDTSKLASGVPAHFRGSGSGTSYSLTISGMEAEDAATYYCQQWSSNPFTFGSGTKLEINGGGGSHHHHHHHH

SEQ ID NO: 109463 - protein, 528 aa, Homo sapiens
MGWSCIILFLVATATGVHSDIQMTQSPSSLSASVGDRVTITCQASQDISNYLNWYQQKPGKAPKLLIYAASSLQSGVPSRFSGSGSGTDFTLTISSLQPEDFATYYCQQAISFPLTFGQSTKVEIKGGGGSGGGGSGGGGSGGGGSEVQLLESGGGLVKPGGSLRLSCAASGFSFSSYWMSWVRQAPGKGLEWISYISGDSGYTNYADSVKGRFTISRDDSKNTLYLQMNSLKTEDTAVYYCASHDYGDYGEYFQHWGQGTLVTVSSGGGGSQVQLQQSGAELARPGASVKMSCKASGYTFTRYTMHWVKQRPGQGLEWIGYINPSRGYTNYNQKFKDKATLTTDKSSSTAYMQLSSLTSEDSAVYYCARYYDDHYSLDYWGQGTTLTVSSVEGGSGGSGGSGGSGGVDQIVLTQSPAIMSASPGEKVTMTCSASSSVSYMNWYQQKSGTSPKRWIYDTSKLASGVPAHFRGSGSGTSYSLTISGMEAEDAATYYCQQWSSNPFTFGSGTKLEINGGGGSHHHHHHHH

SEQ ID NO: 109464 - protein, 246 aa, Homo sapiens
DIQMTQSPSSLSASVGDRVTITCQASQDISNYLNWYQQKPGKAPKLLIYAASSLQSGVPSRFSGSGSGTDFTLTISSLQPEDFATYYCQQYYSYPFTFGPGTKVDIKGGGGSGGGGSGGGGSGGGGSQVQLVQSGAEVKKPGASVKVSCKASGYTFTNYYMHWVRQAPGQGLEWMGMINPSGGGTSYAQKFQGRVTMTRDTSTSTVYMELSSLRSEDTAVYYCARGNPWELRLDYWGQGTLVTVSS

SEQ ID NO: 109465 - protein, 243 aa, Homo sapiens
QVQLVQSGAEVKKPGASVKVSCKASGYTFTRYTMHWVRQAPGQGLEWMGYINPSRGYTNYNQKFKDRVTLTTDKSSSTAYMELSSLRSEDTAVYYCARYYDDHYSLDYWGQGTLVTVSSVEGGSGGSGGSGGSGGVDDIQMTQSPSSLSASVGDRVTITCSASSSVSYMNWYQQKPGKAPKRLIYDTSKLASGVPSRFSGSGSGTDFTLTISSLQPEDFATYYCQQWSSNPFTFGQGTKLEIK

SEQ ID NO: 109466 - protein, 254 aa, Homo sapiens
EVQLVESGGGLVQPGGSLRLSCAASGFTFSTYAMNWVRQAPGKGLEWVGRIRSKYNNYATYYADSVKGRFTISRDDSKNTLYLQMNSLRAEDTAVYYCVRHGNFGDSYVSWFAYWGQGTLVTVSSGKPGSGKPGSGKPGSGKPGSQAVVTQEPSLTVSPGGTVTLTCGSSTGAVTTSNYANWVQQKPGKSPRGLIGGTNKRAPGVPARFSGSLLGGKAALTISGAQPEDEADYYCALWYSNHWVFGGGTKLTVL

SEQ ID NO: 109467 - protein, 253 aa, Homo sapiens
DIQMTQSPSSLSASVGDRVTITCRASQSISSWLAWYQQKPGKAPKLLIYAASTLQSGVPSRFSGSGSGTDFTLTISSLQPEDFATYYCQQSYSIPLTFGGGTKVEIKGGGGSGGGGSGGGGSGGGGSQVQLVQSGAEVKKPGSSVKVSCKASGGTFSNFGVSWLRQAPGQGLEWMGGIIPILGTANYAQKFQGRVTITADESTSTAYMELSSLRSEDTAVYYCATPTNSGYYGPYYYYGMDVWGQGTTVTVSS

SEQ ID NO: 109468 - protein, 243 aa, Homo sapiens; identical to SEQ ID NO: 109465

SEQ ID NO: 109469 - protein, 254 aa, Homo sapiens; identical to SEQ ID NO: 109466

SEQ ID NO: 109470 - protein, 502 aa, Homo sapiens
MGWSCIILFLVATATGVHSQVQLVQSGAEVKKPGASVKVSCKASGYTFTNYYMHWVRQAPGQGLEWMGMINPSGGGTSYAQKFQGRVTMTRDTSTSTVYMELSSLRSEDTAVYYCARGNPWELRLDYWGQGTLVTVSSGGGGSGGGGSGGGGSGGGGSDIQMTQSPSSLSASVGDRVTITCQASQDISNYLNWYQQKPGKAPKLLIYAASSLQSGVPSRFSGSGSGTDFTLTISSLQPEDFATYYCQQYYSYPFTFGPGTKVDIKGGGGSEPKSSDKTHTCPPCPAPELLGGPSVFLFPPKPKDTLMISRTPEVTCVVVDVSHEDPEVKFNWYVDGVEVHNAKTKPREEQYQSTYRVVSVLTVLHQDWLNGKEYKCKVSNKALPAPIEKTISKAKGQPREPQVYTLPPCREEMTKNQVSLWCLVKGFYPSDIAVEWESNGQPENNYKTTPPVLDSDGSFFLYSKLTVDKSRWQQGNVFSCSVMHEALHNHYTQKSLSLSPGK

SEQ ID NO: 109471 - protein, 724 aa, Homo sapiens
MGWSCIILFLVATATGVHSQVQLVQSGAEVKKPGASVKVSCKASGYTFTNYYMHWVRQAPGQGLEWMGMINPSGGGTSYAQKFQGRVTMTRDTSTSTVYMELSSLRSEDTAVYYCARGNPWELRLDYWGQGTLVTVSSGGGGSGGGGSGGGGSGGGGSDIQMTQSPSSLSASVGDRVTITCQASQDISNYLNWYQQKPGKAPKLLIYAASSLQSGVPSRFSGSGSGTDFTLTISSLQPEDFATYYCQQYYSYPFTFGPGTKVDIKGGGGSGGGGSQVQLQQSGAELARPGASVKMSCKASGYTFTRYTMHWVKQRPGQGLEWIGYINPSRGYTNYNQKFKDKATLTTDKSSSTAYMQLSSLTSEDSAVYYCARYYDDHYSLDYWGQGTTLTVSSASTKGPSVFPLAPSSKSTSGGTAALGCLVKDYFPEPVTVSWNSGALTSGVHTFPAVLQSSGLYSLSSVVTVPSSSLGTQTYICNVNHKPSNTKVDKRVEPKSCDKTHTCPPCPAPELLGGPSVFLFPPKPKDTLMISRTPEVTCVVVDVSHEDPEVKFNWYVDGVEVHNAKTKPREEQYQSTYRVVSVLTVLHQDWLNGKEYKCKVSNKALPAPIEKTISKAKGQPREPQVCTLPPSREEMTKNQVSLSCAVKGFYPSDIAVEWESNGQPENNYKTTPPVLDSDGSFFLVSKLTVDKSRWQQGNVFSCSVMHEALHNRFTQKSLSLSPGK

SEQ ID NO: 109472 - protein, 235 aa, Homo sapiens
MDMRVPAQLLGLLLLWLPGARCQIVLTQSPAIMSASPGEKVTMTCSASSSVSYMNWYQQKSGTSPKRWIYDTSKLASGVPAHFRGSGSGTSYSLTISGMEAEDAATYYCQQWSSNPFTFGSGTKLEINRTVAAPSVFIFPPSDEQLKSGTASVVCLLNNFYPREAKVQWKVDNALQSGNSQESVTEQDSKDSTYSLSSTLTLSKADYEKHKVYACEVTHQGLSSPVTKSFNRGEC

SEQ ID NO: 109473 - protein, 503 aa, Homo sapiens
MGWSCIILFLVATATGVHSEVQLLESGGGLVKPGGSLRLSCAASGFSFSSYWMSWVRQAPGKGLEWISYISGDSGYTNYADSVKGRFTISRDDSKNTLYLQMNSLKTEDTAVYYCASHDYGDYGEYFQHWGQGTLVTVSSGGGGSGGGGSGGGGSGGGGSDIQMTQSPSSLSASVGDRVTITCQASQDISNYLNWYQQKPGKAPKLLIYAASSLQSGVPSRFSGSGSGTDFTLTISSLQPEDFATYYCQQAISFPLTFGQSTKVEIKGGGSEPKSSDKTHTCPPCPAPELLGGPSVFLFPPKPKDTLMISRTPEVTCVVVDVSHEDPEVKFNWYVDGVEVHNAKTKPREEQYQSTYRVVSVLTVLHQDWLNGKEYKCKVSNKALPAPIEKTISKAKGQPREPQVYTLPPCREEMTKNQVSLWCLVKGFYPSDIAVEWESNGQPENNYKTTPPVLDSDGSFFLYSKLTVDKSRWQQGNVFSCSVMHEALHNHYTQKSLSLSPGK

SEQ ID NO: 109474 - protein, 725 aa, Homo sapiens
MGWSCIILFLVATATGVHSEVQLLESGGGLVKPGGSLRLSCAASGFSFSSYWMSWVRQAPGKGLEWISYISGDSGYTNYADSVKGRFTISRDDSKNTLYLQMNSLKTEDTAVYYCASHDYGDYGEYFQHWGQGTLVTVSSGGGGSGGGGSGGGGSGGGGSDIQMTQSPSSLSASVGDRVTITCQASQDISNYLNWYQQKPGKAPKLLIYAASSLQSGVPSRFSGSGSGTDFTLTISSLQPEDFATYYCQQAISFPLTFGQSTKVEIKGGGSGGGGSQVQLQQSGAELARPGASVKMSCKASGYTFTRYTMHWVKQRPGQGLEWIGYINPSRGYTNYNQKFKDKATLTTDKSSSTAYMQLSSLTSEDSAVYYCARYYDDHYSLDYWGQGTTLTVSSASTKGPSVFPLAPSSKSTSGGTAALGCLVKDYFPEPVTVSWNSGALTSGVHTFPAVLQSSGLYSLSSVVTVPSSSLGTQTYICNVNHKPSNTKVDKRVEPKSCDKTHTCPPCPAPELLGGPSVFLFPPKPKDTLMISRTPEVTCVVVDVSHEDPEVKFNWYVDGVEVHNAKTKPREEQYQSTYRVVSVLTVLHQDWLNGKEYKCKVSNKALPAPIEKTISKAKGQPREPQVCTLPPSREEMTKNQVSLSCAVKGFYPSDIAVEWESNGQPENNYKTTPPVLDSDGSFFLVSKLTVDKSRWQQGNVFSCSVMHEALHNRFTQKSLSLSPGK

SEQ ID NO: 109475 - protein, 235 aa, Homo sapiens; identical to SEQ ID NO: 109472

SEQ ID NO: 109476 - protein, 246 aa, Homo sapiens
QVQLVQSGAEVKKPGASVKVSCKASGYTFTNYYMHWVRQAPGQGLEWMGMINPSGGGTSYAQKFQGRVTMTRDTSTSTVYMELSSLRSEDTAVYYCARGNPWELRLDYWGQGTLVTVSSGGGGSGGGGSGGGGSGGGGSDIQMTQSPSSLSASVGDRVTITCQASQDISNYLNWYQQKPGKAPKLLIYAASSLQSGVPSRFSGSGSGTDFTLTISSLQPEDFATYYCQQYYSYPFTFGPGTKVDIK

SEQ ID NO: 109477 - protein, 237 aa, Homo sapiens
GGGGSEPKSSDKTHTCPPCPAPELLGGPSVFLFPPKPKDTLMISRTPEVTCVVVDVSHEDPEVKFNWYVDGVEVHNAKTKPREEQYQSTYRVVSVLTVLHQDWLNGKEYKCKVSNKALPAPIEKTISKAKGQPREPQVYTLPPCREEMTKNQVSLWCLVKGFYPSDIAVEWESNGQPENNYKTTPPVLDSDGSFFLYSKLTVDKSRWQQGNVFSCSVMHEALHNHYTQKSLSLSPGK

SEQ ID NO: 109478 - protein, 119 aa, Homo sapiens
QVQLVQSGAEVKKPGASVKVSCKASGYTFTRYTMHWVRQAPGQGLEWMGYINPSRGYTNYNQKFKDRVTLTTDKSSSTAYMELSSLRSEDTAVYYCARYYDDHYSLDYWGQGTLVTVSS

SEQ ID NO: 109479 - protein, 330 aa, Homo sapiens
ASTKGPSVFPLAPSSKSTSGGTAALGCLVKDYFPEPVTVSWNSGALTSGVHTFPAVLQSSGLYSLSSVVTVPSSSLGTQTYICNVNHKPSNTKVDKRVEPKSCDKTHTCPPCPAPELLGGPSVFLFPPKPKDTLMISRTPEVTCVVVDVSHEDPEVKFNWYVDGVEVHNAKTKPREEQYQSTYRVVSVLTVLHQDWLNGKEYKCKVSNKALPAPIEKTISKAKGQPREPQVCTLPPSREEMTKNQVSLSCAVKGFYPSDIAVEWESNGQPENNYKTTPPVLDSDGSFFLVSKLTVDKSRWQQGNVFSCSVMHEALHNRFTQKSLSLSPGK

SEQ ID NO: 109480 - protein, 213 aa, Homo sapiens
DIQMTQSPSSLSASVGDRVTITCSASSSVSYMNWYQQKPGKAPKRLIYDTSKLASGVPSRFSGSGSGTDFTLTISSLQPEDFATYYCQQWSSNPFTFGQGTKLEIKRTVAAPSVFIFPPSDEQLKSGTASVVCLLNNFYPREAKVQWKVDNALQSGNSQESVTEQDSKDSTYSLSSTLTLSKADYEKHKVYACEVTHQGLSSPVTKSFNRGEC

SEQ ID NO: 109481 - protein, 246 aa, Homo sapiens; identical to SEQ ID NO: 109476

SEQ ID NO: 109482 - protein, 237 aa, Homo sapiens; identical to SEQ ID NO: 109477

SEQ ID NO: 109483 - protein, 125 aa, Homo sapiens
EVQLVESGGGLVQPGGSLRLSCAASGFTFSTYAMNWVRQAPGKGLEWVGRIRSKYNNYATYYADSVKGRFTISRDDSKNTLYLQMNSLRAEDTAVYYCVRHGNFGDSYVSWFAYWGQGTLVTVSS

SEQ ID NO: 109484 - protein, 330 aa, Homo sapiens; identical to SEQ ID NO: 109479

SEQ ID NO: 109485 - protein, 216 aa, Homo sapiens
QAVVTQEPSLTVSPGGTVTLTCGSSTGAVTTSNYANWVQQKPGKSPRGLIGGTNKRAPGVPARFSGSLLGGKAALTISGAQPEDEADYYCALWYSNHWVFGGGTKLTVLRTVAAPSVFIFPPSDEQLKSGTASVVCLLNNFYPREAKVQWKVDNALQSGNSQESVTEQDSKDSTYSLSSTLTLSKADYEKHKVYACEVTHQGLSSPVTKSFNRGEC

SEQ ID NO: 109486 - protein, 253 aa, Homo sapiens
QVQLVQSGAEVKKPGSSVKVSCKASGGTFSNFGVSWLRQAPGQGLEWMGGIIPILGTANYAQKFQGRVTITADESTSTAYMELSSLRSEDTAVYYCATPTNSGYYGPYYYYGMDVWGQGTTVTVSSGGGGSGGGGSGGGGSGGGGSDIQMTQSPSSLSASVGDRVTITCRASQSISSWLAWYQQKPGKAPKLLIYAASTLQSGVPSRFSGSGSGTDFTLTISSLQPEDFATYYCQQSYSIPLTFGGGTKVEIK

SEQ ID NO: 109487 - protein, 237 aa, Homo sapiens; identical to SEQ ID NO: 109477

SEQ ID NO: 109488 - protein, 119 aa, Homo sapiens; identical to SEQ ID NO: 109478

SEQ ID NO: 109489 - protein, 330 aa, Homo sapiens; identical to SEQ ID NO: 109479

SEQ ID NO: 109490 - protein, 213 aa, Homo sapiens; identical to SEQ ID NO: 109480

SEQ ID NO: 109491 - protein, 253 aa, Homo sapiens; identical to SEQ ID NO: 109486

SEQ ID NO: 109492 - protein, 237 aa, Homo sapiens; identical to SEQ ID NO: 109477

SEQ ID NO: 109493 - protein, 125 aa, Homo sapiens; identical to SEQ ID NO: 109483

SEQ ID NO: 109494 - protein, 330 aa, Homo sapiens; identical to SEQ ID NO: 109479

SEQ ID NO: 109495 - protein, 216 aa, Homo sapiens; identical to SEQ ID NO: 109485

SEQ ID NO: 109496 - protein, 502 aa, Homo sapiens; identical to SEQ ID NO: 109470

SEQ ID NO: 109497 - protein, 468 aa, Homo sapiens
MGWSCIILFLVATATGVHSQVQLQQSGAELARPGASVKMSCKASGYTFTRYTMHWVKQRPGQGLEWIGYINPSRGYTNYNQKFKDKATLTTDKSSSTAYMQLSSLTSEDSAVYYCARYYDDHYSLDYWGQGTTLTVSSASTKGPSVFPLAPSSKSTSGGTAALGCLVKDYFPEPVTVSWNSGALTSGVHTFPAVLQSSGLYSLSSVVTVPSSSLGTQTYICNVNHKPSNTKVDKRVEPKSCDKTHTCPPCPAPELLGGPSVFLFPPKPKDTLMISRTPEVTCVVVDVSHEDPEVKFNWYVDGVEVHNAKTKPREEQYQSTYRVVSVLTVLHQDWLNGKEYKCKVSNKALPAPIEKTISKAKGQPREPQVCTLPPSREEMTKNQVSLSCAVKGFYPSDIAVEWESNGQPENNYKTTPPVLDSDGSFFLVSKLTVDKSRWQQGNVFSCSVMHEALHNRFTQKSLSLSPGK

SEQ ID NO: 109498 - protein, 235 aa, Homo sapiens; identical to SEQ ID NO: 109472

SEQ ID NO: 109499 - protein, 503 aa, Homo sapiens; identical to SEQ ID NO: 109473

SEQ ID NO: 109500 - protein, 468 aa, Homo sapiens; identical to SEQ ID NO: 109497

SEQ ID NO: 109501 - protein, 235 aa, Homo sapiens; identical to SEQ ID NO: 109472

SEQ ID NO: 109502 - protein, 119 aa, Homo sapiens; identical to SEQ ID NO: 109478

SEQ ID NO: 109503 - protein, 330 aa, Homo sapiens; identical to SEQ ID NO: 109479

SEQ ID NO: 109504 - protein, 246 aa, Homo sapiens; identical to SEQ ID NO: 109476

SEQ ID NO: 109505 - protein, 237 aa, Homo sapiens; identical to SEQ ID NO: 109477

SEQ ID NO: 109506 - protein, 213 aa, Homo sapiens; identical to SEQ ID NO: 109480

SEQ ID NO: 109507 - protein, 125 aa, Homo sapiens; identical to SEQ ID NO: 109483

SEQ ID NO: 109508 - protein, 330 aa, Homo sapiens; identical to SEQ ID NO: 109479

SEQ ID NO: 109509 - protein, 246 aa, Homo sapiens; identical to SEQ ID NO: 109476

SEQ ID NO: 109510 - protein, 237 aa, Homo sapiens; identical to SEQ ID NO: 109477

SEQ ID NO: 109511 - protein, 216 aa, Homo sapiens; identical to SEQ ID NO: 109485

SEQ ID NO: 109512 - protein, 119 aa, Homo sapiens; identical to SEQ ID NO: 109478

SEQ ID NO: 109513 - protein, 330 aa, Homo sapiens; identical to SEQ ID NO: 109479

SEQ ID NO: 109514 - protein, 253 aa, Homo sapiens; identical to SEQ ID NO: 109486

SEQ ID NO: 109515 - protein, 237 aa, Homo sapiens; identical to SEQ ID NO: 109477

SEQ ID NO: 109516 - protein, 213 aa, Homo sapiens; identical to SEQ ID NO: 109480

SEQ ID NO: 109517 - protein, 125 aa, Homo sapiens; identical to SEQ ID NO: 109483

SEQ ID NO: 109518 - protein, 330 aa, Homo sapiens; identical to SEQ ID NO: 109479

SEQ ID NO: 109519 - protein, 253 aa, Homo sapiens; identical to SEQ ID NO: 109486

SEQ ID NO: 109520 - protein, 237 aa, Homo sapiens; identical to SEQ ID NO: 109477

SEQ ID NO: 109521 - protein, 216 aa, Homo sapiens; identical to SEQ ID NO: 109485

SEQ ID NO: 109522 - protein, 724 aa, Homo sapiens
MGWSCIILFLVATATGVHSQVQLQQSGAELARPGASVKMSCKASGYTFTRYTMHWVKQRPGQGLEWIGYINPSRGYTNYNQKFKDKATLTTDKSSSTAYMQLSSLTSEDSAVYYCARYYDDHYSLDYWGQGTTLTVSSASTKGPSVFPLAPSSKSTSGGTAALGCLVKDYFPEPVTVSWNSGALTSGVHTFPAVLQSSGLYSLSSVVTVPSSSLGTQTYICNVNHKPSNTKVDKRVEPKSCDKTHTCPPCPAPELLGGPSVFLFPPKPKDTLMISRTPEVTCVVVDVSHEDPEVKFNWYVDGVEVHNAKTKPREEQYQSTYRVVSVLTVLHQDWLNGKEYKCKVSNKALPAPIEKTISKAKGQPREPQVYTLPPSREEMTKNQVSLTCLVKGFYPSDIAVEWESNGQPENNYKTTPPVLDSDGSFFLYSKLTVDKSRWQQGNVFSCSVMHEALHNHYTQKSLSLSPGKGGGGSGGGGSQVQLVQSGAEVKKPGASVKVSCKASGYTFTNYYMHWVRQAPGQGLEWMGMINPSGGGTSYAQKFQGRVTMTRDTSTSTVYMELSSLRSEDTAVYYCARGNPWELRLDYWGQGTLVTVSSGGGGSGGGGSGGGGSGGGGSDIQMTQSPSSLSASVGDRVTITCQASQDISNYLNWYQQKPGKAPKLLIYAASSLQSGVPSRFSGSGSGTDFTLTISSLQPEDFATYYCQQYYSYPFTFGPGTKVDIK

SEQ ID NO: 109523 - protein, 235 aa, Homo sapiens; identical to SEQ ID NO: 109472

SEQ ID NO: 109524 - protein, 726 aa, Homo sapiens
MGWSCIILFLVATATGVHSQVQLQQSGAELARPGASVKMSCKASGYTFTRYTMHWVKQRPGQGLEWIGYINPSRGYTNYNQKFKDKATLTTDKSSSTAYMQLSSLTSEDSAVYYCARYYDDHYSLDYWGQGTTLTVSSASTKGPSVFPLAPSSKSTSGGTAALGCLVKDYFPEPVTVSWNSGALTSGVHTFPAVLQSSGLYSLSSVVTVPSSSLGTQTYICNVNHKPSNTKVDKRVEPKSCDKTHTCPPCPAPELLGGPSVFLFPPKPKDTLMISRTPEVTCVVVDVSHEDPEVKFNWYVDGVEVHNAKTKPREEQYQSTYRVVSVLTVLHQDWLNGKEYKCKVSNKALPAPIEKTISKAKGQPREPQVYTLPPSREEMTKNQVSLTCLVKGFYPSDIAVEWESNGQPENNYKTTPPVLDSDGSFFLYSKLTVDKSRWQQGNVFSCSVMHEALHNHYTQKSLSLSPGKGGGGSGGGGSEVQLLESGGGLVKPGGSLRLSCAASGFSFSSYWMSWVRQAPGKGLEWISYISGDSGYTNYADSVKGRFTISRDDSKNTLYLQMNSLKTEDTAVYYCASHDYGDYGEYFQHWGQGTLVTVSSGGGGSGGGGSGGGGSGGGGSDIQMTQSPSSLSASVGDRVTITCQASQDISNYLNWYQQKPGKAPKLLIYAASSLQSGVPSRFSGSGSGTDFTLTISSLQPEDFATYYCQQAISFPLTFGQSTKVEIK

SEQ ID NO: 109525 - protein, 235 aa, Homo sapiens; identical to SEQ ID NO: 109472

SEQ ID NO: 109526 - protein, 119 aa, Homo sapiens; identical to SEQ ID NO: 109478

SEQ ID NO: 109527 - protein, 330 aa, Homo sapiens
ASTKGPSVFPLAPSSKSTSGGTAALGCLVKDYFPEPVTVSWNSGALTSGVHTFPAVLQSSGLYSLSSVVTVPSSSLGTQTYICNVNHKPSNTKVDKRVEPKSCDKTHTCPPCPAPELLGGPSVFLFPPKPKDTLMISRTPEVTCVVVDVSHEDPEVKFNWYVDGVEVHNAKTKPREEQYQSTYRVVSVLTVLHQDWLNGKEYKCKVSNKALPAPIEKTISKAKGQPREPQVYTLPPSREEMTKNQVSLTCLVKGFYPSDIAVEWESNGQPENNYKTTPPVLDSDGSFFLYSKLTVDKSRWQQGNVFSCSVMHEALHNHYTQKSLSLSPGK

SEQ ID NO: 109528 - protein, 246 aa, Homo sapiens; identical to SEQ ID NO: 109476

SEQ ID NO: 109529 - protein, 213 aa, Homo sapiens; identical to SEQ ID NO: 109480

SEQ ID NO: 109530 - protein, 125 aa, Homo sapiens; identical to SEQ ID NO: 109483

SEQ ID NO: 109531 - protein, 330 aa, Homo sapiens; identical to SEQ ID NO: 109527

SEQ ID NO: 109532 - protein, 246 aa, Homo sapiens; identical to SEQ ID NO: 109476

SEQ ID NO: 109533 - protein, 216 aa, Homo sapiens; identical to SEQ ID NO: 109485

SEQ ID NO: 109534 - protein, 119 aa, Homo sapiens; identical to SEQ ID NO: 109478

SEQ ID NO: 109535 - protein, 330 aa, Homo sapiens; identical to SEQ ID NO: 109527

SEQ ID NO: 109536 - protein, 253 aa, Homo sapiens; identical to SEQ ID NO: 109486

SEQ ID NO: 109537 - protein, 213 aa, Homo sapiens; identical to SEQ ID NO: 109480

SEQ ID NO: 109538 - protein, 125 aa, Homo sapiens; identical to SEQ ID NO: 109483

SEQ ID NO: 109539 - protein, 253 aa, Homo sapiens; identical to SEQ ID NO: 109486

SEQ ID NO: 109540 - protein, 216 aa, Homo sapiens; identical to SEQ ID NO: 109485

SEQ ID NO: 109541 - protein, 253 aa, Homo sapiens
MGWSCIILFLVATATGVHSGSEPKSSDKTHTCPPCPAPELLGGPSVFLFPPKPKDTLMISRTPEVTCVVVDVSHEDPEVKFNWYVDGVEVHNAKTKPREEQYQSTYRVVSVLTVLHQDWLNGKEYKCKVSNKALPAPIEKTISKAKGQPREPQVYTLPPCREEMTKNQVSLWCLVKGFYPSDIAVEWESNGQPENNYKTTPPVLDSDGSFFLYSKLTVDKSRWQQGNVFSCSVMHEALHNHYTQKSLSLSPGK

SEQ ID NO: 109542 - protein, 724 aa, Homo sapiens; identical to SEQ ID NO: 109471

SEQ ID NO: 109543 - protein, 235 aa, Homo sapiens; identical to SEQ ID NO: 109472

SEQ ID NO: 109544 - protein, 253 aa, Homo sapiens; identical to SEQ ID NO: 109541

SEQ ID NO: 109545 - protein, 725 aa, Homo sapiens; identical to SEQ ID NO: 109474

SEQ ID NO: 109546 - protein, 235 aa, Homo sapiens; identical to SEQ ID NO: 109472

SEQ ID NO: 109547 - protein, 234 aa, Homo sapiens
GSEPKSSDKTHTCPPCPAPELLGGPSVFLFPPKPKDTLMISRTPEVTCVVVDVSHEDPEVKFNWYVDGVEVHNAKTKPREEQYQSTYRVVSVLTVLHQDWLNGKEYKCKVSNKALPAPIEKTISKAKGQPREPQVYTLPPCREEMTKNQVSLWCLVKGFYPSDIAVEWESNGQPENNYKTTPPVLDSDGSFFLYSKLTVDKSRWQQGNVFSCSVMHEALHNHYTQKSLSLSPGK

SEQ ID NO: 109548 - protein, 119 aa, Homo sapiens; identical to SEQ ID NO: 109478

SEQ ID NO: 109549 - protein, 330 aa, Homo sapiens; identical to SEQ ID NO: 109479

SEQ ID NO: 109550 - protein, 213 aa, Homo sapiens; identical to SEQ ID NO: 109480

SEQ ID NO: 109551 - protein, 246 aa, Homo sapiens; identical to SEQ ID NO: 109476

SEQ ID NO: 109552 - protein, 234 aa, Homo sapiens; identical to SEQ ID NO: 109547

SEQ ID NO: 109553 - protein, 125 aa, Homo sapiens; identical to SEQ ID NO: 109483

SEQ ID NO: 109554 - protein, 330 aa, Homo sapiens; identical to SEQ ID NO: 109479

SEQ ID NO: 109555 - protein, 216 aa, Homo sapiens; identical to SEQ ID NO: 109485

SEQ ID NO: 109556 - protein, 246 aa, Homo sapiens; identical to SEQ ID NO: 109476

SEQ ID NO: 109557 - protein, 234 aa, Homo sapiens; identical to SEQ ID NO: 109547

SEQ ID NO: 109558 - protein, 119 aa, Homo sapiens; identical to SEQ ID NO: 109478

SEQ ID NO: 109559 - protein, 330 aa, Homo sapiens; identical to SEQ ID NO: 109479

SEQ ID NO: 109560 - protein, 213 aa, Homo sapiens; identical to SEQ ID NO: 109480

SEQ ID NO: 109561 - protein, 253 aa, Homo sapiens; identical to SEQ ID NO: 109486

SEQ ID NO: 109562 - protein, 234 aa, Homo sapiens; identical to SEQ ID NO: 109547

SEQ ID NO: 109563 - protein, 125 aa, Homo sapiens; identical to SEQ ID NO: 109483

SEQ ID NO: 109564 - protein, 330 aa, Homo sapiens; identical to SEQ ID NO: 109479

SEQ ID NO: 109565 - protein, 216 aa, Homo sapiens; identical to SEQ ID NO: 109485

SEQ ID NO: 109566 - protein, 253 aa, Homo sapiens; identical to SEQ ID NO: 109486

SEQ ID NO: 109567 - protein, 724 aa, Homo sapiens
MGWSCIILFLVATATGVHSQVQLVQSGAEVKKPGASVKVSCKASGYTFTNYYMHWVRQAPGQGLEWMGMINPSGGGTSYAQKFQGRVTMTRDTSTSTVYMELSSLRSEDTAVYYCARGNPWELRLDYWGQGTLVTVSSGGGGSGGGGSGGGGSGGGGSDIQMTQSPSSLSASVGDRVTITCQASQDISNYLNWYQQKPGKAPKLLIYAASSLQSGVPSRFSGSGSGTDFTLTISSLQPEDFATYYCQQYYSYPFTFGPGTKVDIKGGGGSGGGGSQVQLQQSGAELARPGASVKMSCKASGYTFTRYTMHWVKQRPGQGLEWIGYINPSRGYTNYNQKFKDKATLTTDKSSSTAYMQLSSLTSEDSAVYYCARYYDDHYSLDYWGQGTTLTVSSASTKGPSVFPLAPSSKSTSGGTAALGCLVKDYFPEPVTVSWNSGALTSGVHTFPAVLQSSGLYSLSSVVTVPSSSLGTQTYICNVNHKPSNTKVDKRVEPKSCDKTHTCPPCPAPELLGGPSVFLFPPKPKDTLMISRTPEVTCVVVDVSHEDPEVKFNWYVDGVEVHNAKTKPREEQYQSTYRVVSVLTVLHQDWLNGKEYKCKVSNKALPAPIEKTISKAKGQPREPQVYTLPPSREEMTKNQVSLTCLVKGFYPSDIAVEWESNGQPENNYKTTPPVLDSDGSFFLYSKLTVDKSRWQQGNVFSCSVMHEALHNHYTQKSLSLSPGK

SEQ ID NO: 109568 - protein, 235 aa, Homo sapiens; identical to SEQ ID NO: 109472

SEQ ID NO: 109569 - protein, 726 aa, Homo sapiens
MGWSCIILFLVATATGVHSEVQLLESGGGLVKPGGSLRLSCAASGFSFSSYWMSWVRQAPGKGLEWISYISGDSGYTNYADSVKGRFTISRDDSKNTLYLQMNSLKTEDTAVYYCASHDYGDYGEYFQHWGQGTLVTVSSGGGGSGGGGSGGGGSGGGGSDIQMTQSPSSLSASVGDRVTITCQASQDISNYLNWYQQKPGKAPKLLIYAASSLQSGVPSRFSGSGSGTDFTLTISSLQPEDFATYYCQQAISFPLTFGQSTKVEIKGGGGSGGGGSQVQLQQSGAELARPGASVKMSCKASGYTFTRYTMHWVKQRPGQGLEWIGYINPSRGYTNYNQKFKDKATLTTDKSSSTAYMQLSSLTSEDSAVYYCARYYDDHYSLDYWGQGTTLTVSSASTKGPSVFPLAPSSKSTSGGTAALGCLVKDYFPEPVTVSWNSGALTSGVHTFPAVLQSSGLYSLSSVVTVPSSSLGTQTYICNVNHKPSNTKVDKRVEPKSCDKTHTCPPCPAPELLGGPSVFLFPPKPKDTLMISRTPEVTCVVVDVSHEDPEVKFNWYVDGVEVHNAKTKPREEQYQSTYRVVSVLTVLHQDWLNGKEYKCKVSNKALPAPIEKTISKAKGQPREPQVYTLPPSREEMTKNQVSLTCLVKGFYPSDIAVEWESNGQPENNYKTTPPVLDSDGSFFLYSKLTVDKSRWQQGNVFSCSVMHEALHNHYTQKSLSLSPGK

SEQ ID NO: 109570 - protein, 235 aa, Homo sapiens; identical to SEQ ID NO: 109472

SEQ ID NO: 109571 - protein, 246 aa, Homo sapiens; identical to SEQ ID NO: 109476

SEQ ID NO: 109572 - protein, 119 aa, Homo sapiens; identical to SEQ ID NO: 109478

SEQ ID NO: 109573 - protein, 330 aa, Homo sapiens; identical to SEQ ID NO: 109527

SEQ ID NO: 109574 - protein, 213 aa, Homo sapiens; identical to SEQ ID NO: 109480

SEQ ID NO: 109575 - protein, 10 aa, Homo sapiens
GGGGSGGGGS

SEQ ID NO: 109576 - protein, 246 aa, Homo sapiens; identical to SEQ ID NO: 109476

SEQ ID NO: 109577 - protein, 125 aa, Homo sapiens; identical to SEQ ID NO: 109483

SEQ ID NO: 109578 - protein, 330 aa, Homo sapiens; identical to SEQ ID NO: 109527

SEQ ID NO: 109579 - protein, 216 aa, Homo sapiens; identical to SEQ ID NO: 109485

SEQ ID NO: 109580 - protein, 253 aa, Homo sapiens; identical to SEQ ID NO: 109486

SEQ ID NO: 109581 - protein, 119 aa, Homo sapiens; identical to SEQ ID NO: 109478

SEQ ID NO: 109582 - protein, 330 aa, Homo sapiens; identical to SEQ ID NO: 109527

SEQ ID NO: 109583 - protein, 213 aa, Homo sapiens; identical to SEQ ID NO: 109480

SEQ ID NO: 109584 - protein, 253 aa, Homo sapiens; identical to SEQ ID NO: 109486

SEQ ID NO: 109585 - protein, 125 aa, Homo sapiens; identical to SEQ ID NO: 109483

SEQ ID NO: 109586 - protein, 330 aa, Homo sapiens; identical to SEQ ID NO: 109527

SEQ ID NO: 109587 - protein, 216 aa, Homo sapiens; identical to SEQ ID NO: 109485

SEQ ID NO: 109588 - protein, 118 aa, Homo sapiens
QVQLVESGGGVVQPGRSLRLSCAASGFTFRSYGMHWVRQAPGKGLEWVAIIWYDGSKKNYADSVKGRFTISRDNSKNTLYLQMNSLRAEDTAVYYCARGTGYNWFDPWGQGTLVTVSS

SEQ ID NO: 109589 - protein, 108 aa, Homo sapiens
EIVLTQSPRTLSLSPGERATLSCRASQSVSSSYLAWYQQKPGQAPRLLIYGASSRATGIPDRFSGSGSGTDFTLTISRLDPEDFAVYYCQQYGSSPITFGQGTRLEIK

SEQ ID NO: 109590 - protein, 5 aa, Homo sapiens
SYGMH

SEQ ID NO: 109591 - protein, 17 aa, Homo sapiens
IIWYDGSKKNYADSVKG

SEQ ID NO: 109592 - protein, 9 aa, Homo sapiens
GTGYNWFDP

SEQ ID NO: 109593 - protein, 12 aa, Homo sapiens
RASQSVSSSYLA

SEQ ID NO: 109594 - protein, 7 aa, Homo sapiens
GASSRAT

SEQ ID NO: 109595 - protein, 9 aa, Homo sapiens
QQYGSSPIT

SEQ ID NO: 109596 - protein, 118 aa, Homo sapiens; identical to SEQ ID NO: 109588

SEQ ID NO: 109597 - protein, 108 aa, Homo sapiens; identical to SEQ ID NO: 109589

SEQ ID NO: 109598 - protein, 5 aa, Homo sapiens
RYTMH

SEQ ID NO: 109599 - protein, 17 aa, Homo sapiens
YINPSRGYTNYNQKFKD

SEQ ID NO: 109600 - protein, 10 aa, Homo sapiens
YYDDHYSLDY

SEQ ID NO: 109601 - protein, 10 aa, Homo sapiens
SASSSVSYMN

SEQ ID NO: 109602 - protein, 7 aa, Homo sapiens
DTSKLAS

SEQ ID NO: 109603 - protein, 9 aa, Homo sapiens
QQWSSNPFT

SEQ ID NO: 109604 - protein, 119 aa, Homo sapiens; identical to SEQ ID NO: 109478

SEQ ID NO: 109605 - protein, 106 aa, Homo sapiens
DIQMTQSPSSLSASVGDRVTITCSASSSVSYMNWYQQKPGKAPKRLIYDTSKLASGVPSRFSGSGSGTDFTLTISSLQPEDFATYYCQQWSSNPFTFGQGTKLEIK

SEQ ID NO: 109606 - protein, 9 aa, Homo sapiens
YTFTRYTMH

SEQ ID NO: 109607 - protein, 13 aa, Homo sapiens
GYINPSRGYTNYN

SEQ ID NO: 109608 - protein, 14 aa, Homo sapiens
CARYYDDHYSLDYW

SEQ ID NO: 109609 - protein, 10 aa, Homo sapiens
SASSSVSYMN

SEQ ID NO: 109610 - protein, 7 aa, Homo sapiens
DTSKLAS

SEQ ID NO: 109611 - protein, 11 aa, Homo sapiens
CQQWSSNPFTF

SEQ ID NO: 109612 - protein, 125 aa, Homo sapiens; identical to SEQ ID NO: 109483

SEQ ID NO: 109613 - protein, 109 aa, Homo sapiens
QAVVTQEPSLTVSPGGTVTLTCGSSTGAVTTSNYANWVQQKPGKSPRGLIGGTNKRAPGVPARFSGSLLGGKAALTISGAQPEDEADYYCALWYSNHWVFGGGTKLTVL

SEQ ID NO: 109614 - protein, 20 aa, Homo sapiens
FTFSTYAMNWVRQAPGKGLE

SEQ ID NO: 109615 - protein, 16 aa, Homo sapiens
TYYADSVKGRFTISRD

SEQ ID NO: 109616 - protein, 18 aa, Homo sapiens
CVRHGNFGDSYVSWFAYW

SEQ ID NO: 109617 - protein, 14 aa, Homo sapiens
GSSTGAVTTSNYAN

SEQ ID NO: 109618 - protein, 7 aa, Homo sapiens
GTNKRAP

SEQ ID NO: 109619 - protein, 11 aa, Homo sapiens
CALWYSNHWVF

SEQ ID NO: 109620 - protein, 10 aa, Homo sapiens
CAATEWLGVW

SEQ ID NO: 109621 - protein, 10 aa, Homo sapiens
CARANWLDYW

SEQ ID NO: 109622 - protein, 10 aa, Homo sapiens
CARANWLDYW

SEQ ID NO: 109623 - protein, 10 aa, Homo sapiens
CARDWVLDYW

SEQ ID NO: 109624 - protein, 10 aa, Homo sapiens
CARGEWLDYW

SEQ ID NO: 109625 - protein, 10 aa, Homo sapiens
CARGWELGYW

SEQ ID NO: 109626 - protein, 11 aa, Homo sapiens
CARDFVGYDDW

SEQ ID NO: 109627 - protein, 11 aa, Homo sapiens
CARDYGDLDYW

SEQ ID NO: 109628 - protein, 11 aa, Homo sapiens [sequence omitted]

SEQ ID NO: 109629 - protein, 12 aa, Homo sapiens
CARDGYSGLDVW

SEQ ID NO: 109630 - protein, 12 aa, Homo sapiens
CARDSGVGMDVW

SEQ ID NO: 109631 - protein, 13 aa, Homo sapiens
CARDGVAVASDYW

SEQ ID NO: 109632 - protein, 13 aa, Homo sapiens
CARGVNVDDFDYW

SEQ ID NO: 109633 - protein, 15 aa, Homo sapiens
CARGDYTGNWYFDLW

SEQ ID NO: 109634 - protein, 10 aa, Homo sapiens
CARANWLDYW

SEQ ID NO: 109635 - protein, 17 aa, Homo sapiens
CARDQFYGGNSGGHDYW

SEQ ID NO: 109636 - protein, 8 aa, Homo sapiens
CAREEDYW

SEQ ID NO: 109637 - protein, 10 aa, Homo sapiens [sequence omitted]

SEQ ID NO: 109638 - protein, 10 aa, Homo sapiens [sequence omitted]

SEQ ID NO: 109639 - protein, 10 aa, Homo sapiens [sequence omitted]

SEQ ID NO: 109640 - protein, 10 aa, Homo sapiens [sequence omitted]

SEQ ID NO: 109641 - protein, 12 aa, Homo sapiens [sequence omitted]

SEQ ID NO: 109642 - protein, 12 aa, Homo sapiens
CARDYGGYVDYW

SEQ ID NO: 109643 - protein, 12 aa, Homo sapiens
CAREGPAALDVW

SEQ ID NO: 109644 - protein, 12 aa, Homo sapiens
CARERRSGMDVW

SEQ ID NO: 109645 - protein, 12 aa, Homo sapiens
CARVLQEGMDVW

SEQ ID NO: 109646 - protein, 12 aa, Homo sapiens
CASERELPFDIW

SEQ ID NO: 109647 - protein, 13 aa, Homo sapiens
CAKGGGGYGMDVW

SEQ ID NO: 109648 - protein, 15 aa, Homo sapiens
CAAMGIAVAGGMDVW

SEQ ID NO: 109649 - protein, 10 aa, Homo sapiens [sequence omitted]

SEQ ID NO: 109650 - protein, 11 aa, Homo sapiens
CATYDDGMDVW

SEQ ID NO: 109651 - protein, 12 aa, Homo sapiens
CARGGGGALDYW

SEQ ID NO: 109652 - protein, 13 aa, Homo sapiens
CALSGNYYGMDVW

SEQ ID NO: 109653 - protein, 14 aa, Homo sapiens
CARGNPWELRLDYW

SEQ ID NO: 109654 - protein, 13 aa, Homo sapiens
CARDKNYYGMDVW

SEQ ID NO: 109655 - protein, 11 aa, Homo sapiens [sequence omitted]

SEQ ID NO: 109656 - protein, 11 aa, Homo sapiens [sequence omitted]

SEQ ID NO: 109657 - protein, 11 aa, Homo sapiens [sequence omitted]

SEQ ID NO: 109658 - protein, 11 aa, Homo sapiens [sequence omitted]

SEQ ID NO: 109659 - protein, 11 aa, Homo sapiens
CQQSYGVPYTF

SEQ ID NO: 109660 - protein, 11 aa, Homo sapiens [sequence omitted]

SEQ ID NO: 109661 - protein, 11 aa, Homo sapiens [sequence omitted]

SEQ ID NO: 109662 - protein, 11 aa, Homo sapiens [sequence omitted]

SEQ ID NO: 109663 - protein, 11 aa, Homo sapiens [sequence omitted]

SEQ ID NO: 109664 - protein, 11 aa, Homo sapiens [sequence omitted]

SEQ ID NO: 109665 - protein, 11 aa, Homo sapiens [sequence omitted]

SEQ ID NO: 109666 - protein, 11 aa, Homo sapiens [sequence omitted]

SEQ ID NO: 109667 - protein, 11 aa, Homo sapiens [sequence omitted]

SEQ ID NO: 109668 - protein, 11 aa, Homo sapiens [sequence omitted]

SEQ ID NO: 109669 - protein, 11 aa, Homo sapiens [sequence omitted]

SEQ ID NO: 109670 - protein, 11 aa, Homo sapiens [sequence omitted]

SEQ ID NO: 109671 - protein, 11 aa, Homo sapiens [sequence omitted]

SEQ ID NO: 109672 - protein, 11 aa, Homo sapiens [sequence omitted]

SEQ ID NO: 109673 - protein, 11 aa, Homo sapiens [sequence omitted]

SEQ ID NO: 109674 - protein, 11 aa, Homo sapiens [sequence omitted]

SEQ ID NO: 109675 - protein, 10 aa, Homo sapiens [sequence omitted]

SEQ ID NO: 109676 - protein, 11 aa, Homo sapiens
CQQTYAIPLTF

SEQ ID NO: 109677 - protein, 11 aa, Homo sapiens [sequence omitted]

SEQ ID NO: 109678 - protein, 11 aa, Homo sapiens [sequence omitted]

SEQ ID NO: 109679 - protein, 11 aa, Homo sapiens [sequence omitted]

SEQ ID NO: 109680 - protein, 10 aa, Homo sapiens [sequence omitted]

SEQ ID NO: 109681 - protein, 11 aa, Homo sapiens [sequence omitted]

SEQ ID NO: 109682 - protein, 11 aa, Homo sapiens
CQQSYSDQWTF

SEQ ID NO: 109683 - protein, 11 aa, Homo sapiens
CQQSYLPPYSF

SEQ ID NO: 109684 - protein, 11 aa, Homo sapiens [sequence omitted]

SEQ ID NO: 109685 - protein, 11 aa, Homo sapiens [sequence omitted]

SEQ ID NO: 109686 - protein, 11 aa, Homo sapiens
CQQSYLPPYSF

SEQ ID NO: 109687 - protein, 9 aa, Homo sapiens
CQEGITYTF

SEQ ID NO: 109688 - protein, 11 aa, Homo sapiens [sequence omitted]

SEQ ID NO: 109689 - protein, 11 aa, Homo sapiens
CQHYGYSPVTF

SEQ ID NO: 109690 - protein, 115 aa, Homo sapiens
QVQLVQSGAEVKKPGASVKVSCKASGGTFSSATISWVRQAPGQGLEWMGWIYPNSGGTVYAQKFQGRVTMTRDTSTSTVYMELSSLRSEDTAVYYCAATEWLGVWGQGTTVTVSS

SEQ ID NO: 109691 - protein, 115 aa, Homo sapiens
EVQLLQSGAEVKKPGSSVKVSCKASGGTFSSYAISWVRQAPGQGLEWMGWINPNSGGTISAPNFQGRVTMTRDTSTSTVYMELSSLRSEDTAVYYCARANWLDYWGQGTLVTVSS

SEQ ID NO: 109692 - protein, 115 aa, Homo sapiens
EVQLLESGAEVKKPGASVKVSCKASGYTFTTYDLAWVRQAPGQGLEWMGWINPNSGGTNYAQKFQGRVTMTRDTSTSTVYMELSSLRSEDTAVYYCARANWLDYWGQGTLVTVSS

SEQ ID NO: 109693 - protein, 115 aa, Homo sapiens
QVQLVQSGAEVKKPGASVKVSCKSSGYSFDSYVVNWVRQAPGQGLEWMGWINPNSGGTNYAQKFQGRVTMTRDTSTSTVYMELSSLRSEDTAVYYCARDWVLDYWGQGTLVTVSS

SEQ ID NO: 109694 - protein, 115 aa, Homo sapiens
QVQLVQSGAEVKKPGASVKVSCKASGYTFTSYGISWVRQAPGQGLEWMGWMNPNSGGTNYAQKFQGRVTMTRDTSTSTVYMELSSLRSEDTAVYYCARGEWLDYWGQGTLVTVSS

SEQ ID NO: 109695 - protein, 115 aa, Homo sapiens
QVQLVQSGAEVKKPGASVKVSCKASGYTFTSYGISWVRQAPGQGLEWMGWINPNSGGTNYAQKFQGRVTMTRDTSTSTVYMELSSLRSEDTAVYYCARGWELGYWGQGTLVTVSS

SEQ ID NO: 109696 - protein, 116 aa, Homo sapiens
QVQLVQSGAEVKKPGASVKVSCKASGYTFTRYTINWVRQAPGQGLEWMGWINPNSGGTNYAQKFQGRVTMTRDTSTSTVYMELSSLRSEDTAVYYCARDFVGYDDWGQGTLVTVSS

SEQ ID NO: 109697 - protein, 116 aa, Homo sapiens
QVQLVQSGAEVKKPGASVKVSCKASGYTFTSYGITWVRQAPGQGLEWMGWINPNSGGTNYAQKFQGRVTMTRDTSTSTVYMELSSLRSEDTAVYYCARDYGDLDYWGQGTLVTVSS

SEQ ID NO: 109698 - protein, 116 aa, Homo sapiens
QVQLVQSGAEVKKPGASVKVSCKASGGTFSNYILSWVRQAPGQGLEWMGWINPDSGGTNYAQKFQGRVTMTRDTSTSTVYMELSSLRSEDTAVYYCARGSYGMDVWGQGTTVTVSS

SEQ ID NO: 109699 - protein, 117 aa, Homo sapiens
QVQLVQSGAEVKKPGASVKVSCKASGYSFTRYNMHWVRQAPGQGLEWMGWINPNSGGTNYAQKFQGRVTMTRDTSTSTVYMELSSLRSEDTAVYYCARDGYSGLDVWGKGTTVTVSS

SEQ ID NO: 109700 - protein, 117 aa, Homo sapiens
QVQLVQSGAEVKKPGASVKVSCKASGGTFSSYAISWVRQAPGQGLEWMGWINPNNGGTNYAQKFQGRVTMTRDTSTSTVYMELSSLRSEDTAVYYCARDSGVGMDVWGQGTTVTVSS

SEQ ID NO: 109701 - protein, 118 aa, Homo sapiens
QVQLVQSGAEVKKPGASVKVSCKASGGTFNNYAFSWVRQAPGQGLEWMGWINPNSGGTNYAQKFQGRVTMTRDTSTSTVYMELSSLRSEDTAVYYCARDGVAVASDYWGQGTLVTVSS

SEQ ID NO: 109702 - protein, 118 aa, Homo sapiens
QVQLVQSGAEVKKPGASVKVSCKASGYTFSSYNMHWVRQAPGQGLEWMGWINGNTGGTNYAQKFQGRVTMTRDTSTSTVYMELSSLRSEDTAVYYCARGVNVDDFDYWGQGTLVTVSS

SEQ ID NO: 109703 - protein, 120 aa, Homo sapiens
QVQLVQSGAEVKKPGASVKVSCKASGGTFSSYAFSWVRQAPGQGLEWMGWINPDTGYTRYAQKFQGRVTMTRDTSTSTVYMELSSLRSEDTAVYYCARGDYTGNWYFDLWGRGTLVTVSS

SEQ ID NO: 109704 - protein, 115 aa, Homo sapiens
EVQLLESGAEVKKPGASVKVSCKASGYTFTSYGISWVRQAPGQGLEWMGWINPYSGGTNYAQKLQGRVTMTRDTSTSTVYMELSSLRSEDTAVYYCARANWLDYWGQGTLVTVSS

SEQ ID NO: 109705 - protein, 122 aa, Homo sapiens
QVQLVQSGAEVKKPGASVKVSCKASGYTFTSYGISWVRQAPGQGLEWMGWISAYNGYTNYAQNLQGRVTMTRDTSTSTVYMELSSLRSEDTAVYYCARDQFYGGNSGGHDYWGQGTLVTVSS

SEQ ID NO: 109706 - protein, 113 aa, Homo sapiens
QVQLVQSGAEVKKPGASVKVSCKASGYTFTDYNMHWVRQAPGQGLEWMGWMNPNSGGTNYAQKFQGRVTMTRDTSTSTVYMELSSLRSEDTAVYYCAREEDYWGQGTLVTVSS

SEQ ID NO: 109707 - protein, 115 aa, Homo sapiens
QVQLVQSGAEVKKPGASVKVSCKASGYTFTRYTINWVRQAPGQGLEWMGWINPNSGGANYAQKFQGRVTMTRDTSTSTVYMELSSLRSEDTAVYYCARGDWFDPWGQGTLVTVSS

SEQ ID NO: 109708 - protein, 115 aa, Homo sapiens
QVQLVQSGAEVKKPGASVKVSCKASGYTFTSYLMHWVRQAPGQGLEWMGWISPNSGGTNYAQKFQGRVTMTRDTSTSTVYMELSSLRSEDTAVYYCARGDWFDPWGQGTLVTVSS

SEQ ID NO: 109709 - protein, 115 aa, Homo sapiens
QVQLVQSGAEVKKPGASVKVSCKASGYTFSDYYVHWVRQAPGQGLEWMGWINPNSGGTNYAQKFQGRVTMTRDTSTSTVYMELSSLRSEDTAVYYCARGEWFDPWGQGTLVTVSS

SEQ ID NO: 109710 - protein, 115 aa, Homo sapiens
QVQLVQSGAEVKKPGASVKVSCKASGYTFTTYYMHWVRQAPGQGLEWMGWINPNSGGTNYAQKFQGRVTMTRDTSTSTVYMELSSLRSEDTAVYYCARSDWFDPWGQGTLVTVSS

SEQ ID NO: 109711 - protein, 117 aa, Homo sapiens
QVQLVQSGAEVKKPGASVKVSCKASGGTFSNYAINWVRQAPGQGLEWMGWISPYSGGTNYAQKFQGRVTMTRDTSTSTVYMELSSLRSEDTAVYYCARDSGSYFDYWGQGTLVTVSS

SEQ ID NO: 109712 - protein, 117 aa, Homo sapiens
QVQLVQSGAEVKKPGASVKVSCKASGYTFTDYYMHWVRQAPGQGLEWMGWIYPNTGGTNYAQKFQGRVTMTRDTSTSTVYMELSSLRSEDTAVYYCARDYGGYVDYWGQGTLVTVSS

SEQ ID NO: 109713 - protein, 117 aa, Homo sapiens
EVQLLESGAEVKKPGASVKVSCKASGYTFTSYAMNWVRQAPGQGLEWMGWMNPNSGGTKYAQKFQGRVTMTRDTSTSTVYMELSSLRSEDTAVYYCAREGPAALDVWGQGTLVTVSS

SEQ ID NO: 109714 - protein, 117 aa, Homo sapiens
QVQLVQSGAEVKKPGASVKVSCKASGYTLTSHLIHWVRQAPGQGLEWMGWINPNSGGTNYAQKFQGRVTMTRDTSTSTVYMELSSLRSEDTAVYYCARERRSGMDVWGQGTTVTVSS

SEQ ID NO: 109715 - protein, 117 aa, Homo sapiens
EVQLLESGAEVKKPGASVKVSCKASGYSFTDYIVHWVRQAPGQGLEWMGWINPYSGGTKYAQKFQGRVTMTRDTSTSTVYMELSSLRSEDTAVYYCARVLQEGMDVWGQGTLVTVSS

SEQ ID NO: 109716 - protein, 117 aa, Homo sapiens
QVQLVQSGAEVKKPGASVKVSCKASGYTFSNFLINWVRQAPGQGLEWMGWINPNSGGTNYAQKFQGRVTMTRDTSTSTVYMELSSLRSEDTAVYYCASERELPFDIWGQGTMVTVSS

SEQ ID NO: 109717 - protein, 118 aa, Homo sapiens
QVQLVQSGAEVKKPGASVKVSCKASGYTFTDYQMFWVRQAPGQGLEWMGWINPNSGGTNYAQKFQGRVTMTRDTSTSTVYMELSSLRSEDTAVYYCAKGGGGYGMDVWGQGTTVTVSS

SEQ ID NO: 109718 - protein, 120 aa, Homo sapiens
QVQLVQSGAEVKKPGASVKVSCKASGGTFSSYAISWVRQAPGQGLEWMGWINPNSGGTNYAQKFQGRVTMTRDTSTSTVYMELSSLRSEDTAVYYCAAMGIAVAGGMDVWGQGTLVTVSS

SEQ ID NO: 109719 - protein, 115 aa, Homo sapiens
QVQLVQSGAEVKKPGASVKVSCKASGYTFTNYHMHWVRQAPGQGLEWMGWIHPDSGGTSYAQKFQGRVTMTRDTSTSTVYMELSSLRSEDTAVYYCARNWNLDYWGQGTLVTVSS

SEQ ID NO: 109720 - protein, 116 aa, Homo sapiens
QVQLVQSGAEVKKPGASVKVSCKASGYTFTGYYMHWVRQAPGQGLEWMGWMNPNSGNTGYAQKFQGRVTMTRDTSTSTVYMELSSLRSEDTAVYYCATYDDGMDVWGQGTTVTVSS

SEQ ID NO: 109721 - protein, 117 aa, Homo sapiens
QVQLVQSGAEVKKPGASVKVSCKASGYTFTSYTVNWVRQAPGQGLEWMGWINPNSGGTKYAQNFQGRVTMTRDTSTSTVYMELSSLRSEDTAVYYCARGGGGALDYWGQGTLVTVSS

SEQ ID NO: 109722 - protein, 118 aa, Homo sapiens
QVQLVQSGAEVKKPGASVKVSCKASGYTFTSYYMHWVRQAPGQGLEWMGMINPRDDTTDYARDFQGRVTMTRDTSTSTVYMELSSLRSEDTAVYYCALSGNYYGMDVWGQGTTVTVSS

SEQ ID NO: 109723 - protein, 119 aa, Homo sapiens
QVQLVQSGAEVKKPGASVKVSCKASGYTFTNYYMHWVRQAPGQGLEWMGMINPSGGGTSYAQKFQGRVTMTRDTSTSTVYMELSSLRSEDTAVYYCARGNPWELRLDYWGQGTLVTVSS

SEQ ID NO: 109724 - protein, 118 aa, Homo sapiens
QVQLVQSGAEVKKPGSSVKVSCKASGYTFTSQYMHWVRQAPGQGLEWMGRIIPLLGIVNYAQKFQGRVTITADESTSTAYMELSSLRSEDTAVYYCARDKNYYGMDVWGQGTTVTVSS

SEQ ID NO: 109725 - protein, 107 aa, Homo sapiens
DIQMTQSPSSLSASVGDRVTITCRASQSISTWLAWYQQKPGKAPKLLIYAASSLRSGVPSRFSGSGSGTDFTLTISSLQPEDFATYYCQQSYNTPYTFGQGTKLEIK

SEQ ID NO: 109726 - protein, 107 aa, Homo sapiens
DIQMTQSPSSLSASVGDRVTITCRASQSISRWLAWYQQKPGKAPKLLIYAASTVQSGVPSRFSGSGSGTDFTLTISSLQPEDFATYYCQQSYSTPYTFGQGTKLEIK

SEQ ID NO: 109727 - protein, 107 aa, Homo sapiens
DIQMTQSPSSLSASVGDRVTITCRASQDISRWLAWYQQKPGKAPKLLIYAASRLQAGVPSRFSGSGSGTDFTLTISSLQPEDFATYYCQQSYSTPYSFGQGTKLEIK

SEQ ID NO: 109728 - protein, 107 aa, Homo sapiens
DIQMTQSPSSLSASVGDRVTITCRASQTISSWLAWYQQKPGKAPKLLIYAASSLQSGVPSRFSGSGSGTDFTLTISSLQPEDFATYYCQQSYSTPFTFGPGTKVDIK

SEQ ID NO: 109729 - protein, 107 aa, Homo sapiens
DIQMTQSPSSLSASVGDRVTITCRASQTISSWLAWYQQKPGKAPKLLIYAASSLQSGVPSRFSGSGSGTDFTLTISSLQPEDFATYYCQQSYGVPYTFGQGTKVEIK

SEQ ID NO: 109730 - protein, 107 aa, Homo sapiens
DIQMTQSPSSLSASVGDRVTITCRASQSISNWLAWYQQKPGKAPKLLIYAASSLQSGVPSRFSGSGSGTDFTLTISSLQPEDFATYYCQQSYSAPYTFGPGTKVDIK

SEQ ID NO: 109731 - protein, 107 aa, Homo sapiens
DIQMTQSPSSLSASVGDRVTITCRASQSVGNWLAWYQQKPGKAPKLLIYGASSLQTGVPSRFSGSGSGTDFTLTISSLQPEDFATYYCQQSYSAPYTFGQGTKVEIK

SEQ ID NO: 109732 - protein, 107 aa, Homo sapiens
DIQMTQSPSSLSASVGDRVTITCRASQNIGNWLAWYQQKPGKAPKLLIYAASTLQTGVPSRFSGSGSGTDFTLTISSLQPEDFATYYCQQSYSAPYSFGQGTKLEIK

SEQ ID NO: 109733 - protein, 107 aa, Homo sapiens
DIQMTQSPSSLSASVGDRVTITCRASQSISRWLAWYQQKPGKAPKLLIYAASSLQSGVPSRFSGSGSGTDFTLTISSLQPEDFATYYCQQSYSTPYTFGQGTKLEIK

SEQ ID NO: 109734 - protein, 107 aa, Homo sapiens
DIQMTQSPSSLSASVGDRVTITCRASQSISSWLAWYQQKPGKAPKLLIYGASSLQSGVPSRFSGSGSGTDFTLTISSLQPEDFATYYCQQSYSVPYSFGQGTKLEIK

SEQ ID NO: 109735 - protein, 107 aa, Homo sapiens
DIQMTQSPSSLSASVGDRVTITCRASQSISKWLAWYQQKPGKAPKLLIYAASSLQSGVPSRFSGSGSGTDFTLTISSLQPEDFATYYCQQSYSAPYTFGQGTKVEIK

SEQ ID NO: 109736 - protein, 107 aa, Homo sapiens
DIQMTQSPSSLSASVGDRVTITCRASQGISNYLAWYQQKPGKAPKLLIYAASTLQSGVPSRFSGSGSGTDFTLTISSLQPEDFATYYCQQSYSVPYSFGQGTKLEIK

SEQ ID NO: 109737 - protein, 107 aa, Homo sapiens
DIQMTQSPSSLSASVGDRVTITCRASQTISNYLNWYQQKPGKAPKLLIYAASNLQSGVPSRFSGSGSGTDFTLTISSLQPEDFATYYCQQSYSTPQTFGQGTKVEIK

SEQ ID NO: 109738 - protein, 107 aa, Homo sapiens
DIQMTQSPSSLSASVGDRVTITCRASRDIGRAVGWYQQKPGKAPKLLIYAASSLQSGVPSRFSGSGSGTDFTLTISSLQPEDFATYYCQQLDSYPFTFGPGTKVDIK

SEQ ID NO: 109739 - protein, 107 aa, Homo sapiens
DIQMTQSPSSLSASVGDRVTITCRASQSISSWLAWYQQKPGKAPKLLIYAASTLQSGVPSRFSGSGSGTDFTLTISSLQPEDFATYYCQQSYSSPYTFGPGTKVDIK

SEQ ID NO: 109740 - protein, 107 aa, Homo sapiens
DIQMTQSPSSLSASVGDRVTITCQASQDISNYLNWYQQKPGKAPKLLIYAASSLQSGVPSRFSGSGSGTDFTLTISSLQPEDFATYYCQQSYSTPLTFGGGTKLEIK

SEQ ID NO: 109741 - protein, 107 aa, Homo sapiens
DIQMTQSPSSLSASVGDRVTITCRASQSIGRWLAWYQQKPGKAPKLLIYAASSLQSGVPSRFSGSGSGTDFTLTISSLQPEDFATYYCQQSYSTPYSFGQGTKVEIK

SEQ ID NO: 109742 - protein, 107 aa, Homo sapiens
DIQMTQSPSSLSASVGDRVTITCRASQSISTWLAWYQQKPGKAPKLLIYAASTLQSGVPSRFSGSGSGTDFTLTISSLQPEDFATYYCQQSYSTPYTFAQGTKLEIK

SEQ ID NO: 109743 - protein, 107 aa, Homo sapiens
DIQMTQSPSSLSASVGDRVTITCQASQDISNYLNWYQQKPGKAPKLLIYGASRLQSGVPSRFSGSGSGTDFTLTISSLQPEDFATYYCQQSYSTPYTFGQGTKLEIK

SEQ ID NO: 109744 - protein, 107 aa, Homo sapiens
DIQMTQSPSSLSASVGDRVTITCRASQSISSWLAWYQQKPGKAPKLLIYAASTLQSGVPSRFSGSGSGTDFTLTISSLQPEDFATYYCQQSYSTPFTFGPGTKVDIK

SEQ ID NO: 109745 - protein, 106 aa, Homo sapiens
DIQMTQSPSSLSASVGDRVTITCRASQSVSNWLAWYQQKPGKAPKLLIYAASSLQSGVPSRFSGSGSGTDFTLTISSLQPEDFATYYCQQSYSTPTFGQGTKLEIK

SEQ ID NO: 109746 - protein, 107 aa, Homo sapiens
DIQMTQSPSSLSASVGDRVTITCQASQDISNYLNWYQQKPGKAPKLLIYAASTLQSGVPSRFSGSGSGTDFTLTISSLQPEDFATYYCQQTYAIPLTFGGGTKVEIK

SEQ ID NO: 109747 - protein, 107 aa, Homo sapiens
DIQMTQSPSSLSASVGDRVTITCQASQDIGSWLAWYQQKPGKAPKLLIYATSSLQSGVPSRFSGSGSGTDFTLTISSLQPEDFATYYCQQSYSTPYTFGQGTKLEIK

SEQ ID NO: 109748 - protein, 107 aa, Homo sapiens
DIQMTQSPSSLSASVGDRVTITCRASQGISRWLAWYQQKPGKAPKLLIYAASTLQPGVPSRFSGSGSGTDFTLTISSLQPEDFATYYCQQSYIAPFTFGPGTKVDIK

SEQ ID NO: 109749 - protein, 107 aa, Homo sapiens
DIQMTQSPSSLSASVGDRVTITCRASQGISNYLAWYQQKPGKAPKLLIYAASRLESGVPSRFSGSGSGTDFTLTISSLQPEDFATYYCQQSYSIPLTFGGGTKVEIK

SEQ ID NO: 109750 - protein, 106 aa, Homo sapiens
DIQMTQSPSSLSASVGDRVTITCRASQSISSYLNWYQQKPGKAPKLLIYGVSSLQSGVPSRFSGSGSGTDFTLTISSLQPEDFATYYCQQSYSNPTFGQGTKVEIK

SEQ ID NO: 109751 - protein, 107 aa, Homo sapiens
DIQMTQSPSSLSASVGDRVTITCRASQSISSWVAWYQQKPGKAPKLLIYGASNLESGVPSRFSGSGSGTDFTLTISSLQPEDFATYYCQQSYSTPYSFGQGTKLEIK

SEQ ID NO: 109752 - protein, 107 aa, Homo sapiens
DIQMTQSPSSLSASVGDRVTITCRASQGISNYLAWYQQKPGKAPKLLIYAASSLQSGVPSRFSGSGSGTDFTLTISSLQPEDFATYYCQQSYSDQWTFGQGTKVEIK

SEQ ID NO: 109753 - protein, 107 aa, Homo sapiens
DIQMTQSPSSLSASVGDRVTITCRASQSISRWLAWYQQKPGKAPKLLIYAASSLQSGVPSRFSGSGSGTDFTLTISSLQPEDFATYYCQQSYLPPYSFGQGTKVEIK

SEQ ID NO: 109754 - protein, 107 aa, Homo sapiens
DIQMTQSPSSLSASVGDRVTITCRASQSISNWLAWYQQKPGKAPKLLIYAASSLQSGVPSRFSGSGSGTYFTLTISSLQPEDFATYYCQQSYSSPYTFGQGTKLEIK

SEQ ID NO: 109755 - protein, 107 aa, Homo sapiens
DIQMTQSPSSLSASVGDRVTITCRASQSISHYLNWYQQKPGKAPKLLIYGASSLQSGVPSRFSGSGSGTDFTLTISSLQPEDFATYYCQQSYTTPWTFGQGTRLEIK

SEQ ID NO: 109756 - protein, 107 aa, Homo sapiens
DIQMTQSPSSLSASVGDRVTITCRASQSISSWLAWYQQKPGKAPKLLIYAASTLQSGVPSRFSGSGSGTDFTLTISSLQPEDFATYYCQQSYLPPYSFGQGTKLEIK

SEQ ID NO: 109757 - protein, 105 aa, Homo sapiens
DIQMTQSPSSLSASVGDRVTITCQASQDISNYLNWYQQKPGKAPKLLIYGASRLQSGVPSRFSGSGSGTDFTLTISSLQPEDFATYYCQEGITYTFGQGTKVEIK

SEQ ID NO: 109758 - protein, 107 aa, Homo sapiens
DIQMTQSPSSLSASVGDRVTITCQASQDISNYLNWYQQKPGKAPKLLIYAASSLQSGVPSRFSGSGSGTDFTLTISSLQPEDFATYYCQQYYSYPFTFGPGTKVDIK

SEQ ID NO: 109759 - protein, 107 aa, Homo sapiens
EIVMTQSPATLSVSPGERATLSCRASQSVSRNLAWYQQKPGQAPRLLIYGASTRATGIPARFSGSGSGTEFTLTISSLQSEDFAVYYCQHYGYSPVTFGQGTKLEIK

SEQ ID NO: 109760 - protein, 12 aa, Homo sapiens
KSCDKTHTCPPC

SEQ ID NO: 109761 - protein, 14 aa, Homo sapiens
CARDGVRYYGMDVW

SEQ ID NO: 109762 - protein, 15 aa, Homo sapiens
CARGVRGYDRSAGYW

SEQ ID NO: 109763 - protein, 16 aa, Homo sapiens
CASHDYGDYGEYFQHW

SEQ ID NO: 109764 - protein, 21 aa, Homo sapiens
CARVSWYCSSTSCGVNWFDPW

SEQ ID NO: 109765 - protein, 15 aa, Homo sapiens
CAKVNWNDGPYFDYW

SEQ ID NO: 109766 - protein, 21 aa, Homo sapiens
CATPTNSGYYGPYYYYGMDVW

SEQ ID NO: 109767 - protein, 9 aa, Homo sapiens
CARDVMDVW

SEQ ID NO: 109768 - protein, 11 aa, Homo sapiens [sequence omitted]

SEQ ID NO: 109769 - protein, 12 aa, Homo sapiens
CARDNGVGVDYW

SEQ ID NO: 109770 - protein, 25 aa, Homo sapiens
CARGIADSGSYYGNGRDYYYGMDVW

SEQ ID NO: 109771 - protein, 11 aa, Homo sapiens [sequence omitted]

SEQ ID NO: 109772 - protein, 14 aa, Homo sapiens
CARDGTRYYGMDVW

SEQ ID NO: 109773 - protein, 12 aa, Homo sapiens
CARDVVANFDYW

SEQ ID NO: 109774 - protein, 18 aa, Homo sapiens
CARGHSSGWYYYYGMDVW

SEQ ID NO: 109775 - protein, 13 aa, Homo sapiens
CAKDLGSYGGYYW

SEQ ID NO: 109776 - protein, 19 aa, Homo sapiens
CARSWFGGFNYHYYGMDVW

SEQ ID NO: 109777 - protein, 14 aa, Homo sapiens
CARELPIGYGMDVW

SEQ ID NO: 109778 - protein, 15 aa, Homo sapiens
CARGGSYYYYGMDVW

SEQ ID NO: 109779 - protein, 11 aa, Homo sapiens [sequence omitted]

SEQ ID NO: 109780 - protein, 11 aa, Homo sapiens [sequence omitted]

SEQ ID NO: 109781 - protein, 11 aa, Homo sapiens [sequence omitted]

SEQ ID NO: 109782 - protein, 11 aa, Homo sapiens [sequence omitted]

SEQ ID NO: 109783 - protein, 11 aa, Homo sapiens [sequence omitted]

SEQ ID NO: 109784 - protein, 11 aa, Homo sapiens [sequence omitted]

SEQ ID NO: 109785 - protein, 11 aa, Homo sapiens
CQQTYMMPYTF

SEQ ID NO: 109786 - protein, 11 aa, Homo sapiens [sequence omitted]

SEQ ID NO: 109787 - protein, 11 aa, Homo sapiens [sequence omitted]

SEQ ID NO: 109788 - protein, 11 aa, Homo sapiens [sequence omitted]

SEQ ID NO: 109789 - protein, 11 aa, Homo sapiens [sequence omitted]

SEQ ID NO: 109790 - protein, 11 aa, Homo sapiens [sequence omitted]

SEQ ID NO: 109791 - protein, 11 aa, Homo sapiens [sequence omitted]

SEQ ID NO: 109792 - protein, 11 aa, Homo sapiens [sequence omitted]

SEQ ID NO: 109793 - protein, 11 aa, Homo sapiens [sequence omitted]

SEQ ID NO: 109794 - protein, 11 aa, Homo sapiens [sequence omitted]

SEQ ID NO: 109795 - protein, 11 aa, Homo sapiens [sequence omitted]

SEQ ID NO: 109796 - protein, 11 aa, Homo sapiens [sequence omitted]

SEQ ID NO: 109797 - protein, 119 aa, Homo sapiens
QVQLVQSGAEVKKPGASVKVSCKASGYTFTSYDINWVRQAPGQGLEWMGIINPRSGSTKYAQKFQGRVTMTRDTSTSTVYMELSSLRSEDTAVYYCARDGVRYYGMDVWGQGTTVTVSS

SEQ ID NO: 109798 - protein, 120 aa, Homo sapiens
QVQLVQSGAEVKKPGSSVKVSCKASGYTFTSHDINWVRQAPGQGLEWMGWMNPNSGDTGYAQKFQGRVTITADESTSTAYMELSSLRSEDTAVYYCARGVRGYDRSAGYWGQGTLVIVSS

SEQ ID NO: 109799 - protein, 121 aa, Homo sapiens
EVQLLESGGGLVKPGGSLRLSCAASGFSFSSYWMSWVRQAPGKGLEWISYISGDSGYTNYADSVKGRFTISRDDSKNTLYLQMNSLKTEDTAVYYCASHDYGDYGEYFQHWGQGTLVTVSS

SEQ ID NO: 109800 - protein, 126 aa, Homo sapiens
EVQLLQSGGGLVQPGGSLRLSCAASGFTFSNSDMNWVRQAPGKGLEWVAYISSGSSTIYYADSVKGRFTISRDNSKNTLYLQMNSLRAEDTAVYYCARVSWYCSSTSCGVNWFDPWGQGTLVTVSS

SEQ ID NO: 109801 - protein, 120 aa, Homo sapiens
EVQLLESGGGLVQPGGSLRLSCAASGFTFSNSDMNWVRQAPGKGLEWVASISSSGGYINYADSVKGRFTISRDNSKNTLYLQMNSLRAEDTAVYYCAKVNWNDGPYFDYWGQGTLVTVSS

SEQ ID NO: 109802 - protein, 126 aa, Homo sapiens
QVQLVQSGAEVKKPGSSVKVSCKASGGTFSNFGVSWLRQAPGQGLEWMGGIIPILGTANYAQKFQGRVTITADESTSTAYMELSSLRSEDTAVYYCATPTNSGYYGPYYYYGMDVWGQGTTVTVSS

SEQ ID NO: 109803 - protein, 114 aa, Homo sapiens
QVQLVQSGAEVKKPGASVKVSCKASGYTFTSYNMHWVRQAPGQGLEWMGWINPNSGGTNYAQKFQGRVTMTRDTSTSTVYMELSSLRSEDTAVYYCARDVMDVWGQGTTVTVSS

SEQ ID NO: 109804 - protein, 116 aa, Homo sapiens
QVQLVQSGAEVKKPGASVKVSCKASGGTFSGYLVSWVRQAPGQGLEWMGWINPNSGGTNTAQKFQGRVTMTRDTSTSTVYMELSSLRSEDTAVYYCAREGYGMDVWGQGTTVTVSS

SEQ ID NO: 109805 - protein, 117 aa, Homo sapiens
QVQLVQSGAEVKKPGASVKVSCKASGYIFRNYPMHWVRQAPGQGLEWMGWINPDSGGTKYAQKFQGRVTMTRDTSTSTVYMELSSLRSEDTAVYYCARDNGVGVDYWGQGTLVTVSS

SEQ ID NO: 109806 - protein, 130 aa, Homo sapiens
QVQLVQSGAEVKKPGASVKVSCKASGYTFTGYYMHWVRQAPGQGLEWMGWMNPNIGNTGYAQKFQGRVTMTRDTSTSTVYMELSSLRSEDTAVYYCARGIADSGSYYGNGRDYYYGMDVWGQGTTVTVSS

SEQ ID NO: 109807 - protein, 116 aa, Homo sapiens
QVQLVQSGAEVKKPGASVKVSCKASGGTFSSYGISWVRQAPGQGLEWMGWINPNSGVTKYAQKFQGRVTMTRDTSTSTVYMELSSLRSEDTAVYYCARGDYYFDYWGQGTLVTVSS

SEQ ID NO: 109808 - protein, 119 aa, Homo sapiens
QVQLVQSGAEVKKPGASVKVSCKASGYTFTSYDINWVRQAPGQGLEWMGWINPNSGDTKYSQKFQGRVTMTRDTSTSTVYMELSSLRSEDTAVYYCARDGTRYYGMDVWGQGTTVTVSS

SEQ ID NO: 109809 - protein, 117 aa, Homo sapiens
EVQLLESGGGLVKPGGSLRLSCAASGFTFSDYYMSWVRQAPGKGLEWVSYISSSSSYTNYADSVKGRFTISRDDSKNTLYLQMNSLKTEDTAVYYCARDVVANFDYWGQGTLVTVSS

SEQ ID NO: 109810 - protein, 123 aa, Homo sapiens
QVQLVQSGAEVKKPGASVKVSCKASGGTFSSYAISWVRQAPGQGLEWMGWMNPDSGSTGYAQRFQGRVTMTRDTSTSTVYMELSSLRSEDTAVYYCARGHSSGWYYYYGMDVWGQGTTVTVSS

SEQ ID NO: 109811 - protein, 118 aa, Homo sapiens
EVQLLESGGGLVQPGGSLRLSCAASGFTFTSYSMHWVRQAPGKGLEWVSSITSFTNTMYYADSVKGRFTISRDNSKNTLYLQMNSLRAEDTAVYYCAKDLGSYGGYYWGQGTLVTVSS

SEQ ID NO: 109812 - protein, 124 aa, Homo sapiens
QVQLVQSGAEVKKPGASVKVSCKASGYTFTNYYMHWVRQAPGQGLEWMGIINPSGGSTSYAQKFQGRVTMTRDTSTSTVYMELSSLRSEDTAVYYCARSWFGGFNYHYYGMDVWGQGTTVTVSS

SEQ ID NO: 109813 - protein, 119 aa, Homo sapiens
QVQLVQSGAEVKKPGASVKVSCKASGYTFTSYYMHWVRQAPGQGLEWMGWMNPNSGNTGYAQKFQGRVTMTRDTSTSTVYMELSSLRSEDTAVYYCARELPIGYGMDVWGQGTTVTVSS

SEQ ID NO: 109814 - protein, 120 aa, Homo sapiens
QVQLVQSGAEVKKPGSSVKVSCKASGGTFSSYAISWVRQAPGQGLEWMGGIIPIVGTANYAQKFQGRVTITADESTSTAYMELSSLRSEDTAVYYCARGGSYYYYGMDVWGQGTTVTVSS

SEQ ID NO: 109815 - protein, 112 aa, Homo sapiens
DIVMTQSPLSLPVTPGEPASISCRSSQSLLHSNGYNYLDWYLQKPGQSPQLLIYLGSYRASGVPDRFSGSGSGTDFTLKISRVEAEDVGVYYCMQGLQTPITFGQGTRLEIK

SEQ ID NO: 109816 - protein, 112 aa, Homo sapiens
DIVMTQSPLSLPVTPGEPASISCRSSQSLLHSNGYNYLDWYLQKPGQSPQLLIYLGSSRASGVPDRFSGSGSGTDFTLKISRVEAEDVGVYYCMQALQTPPTFGPGTKVDIK

SEQ ID NO: 109817 - protein, 107 aa, Homo sapiens
DIQMTQSPSSLSASVGDRVTITCQASQDISNYLNWYQQKPGKAPKLLIYAASSLQSGVPSRFSGSGSGTDFTLTISSLQPEDFATYYCQQAISFPLTFGQSTKVEIK

SEQ ID NO: 109818 - protein, 107 aa, Homo sapiens
DIQMTQSPSSLSASVGDRVTITCRASQSISSWLAWYQQKPGKAPKLLIYSASTLQSGVPSRFSGSGSGTDFTLTISSLQPEDFATYYCQQANSFPLTFGGGTKVEIK

SEQ ID NO: 109819 - protein, 107 aa, Homo sapiens
DIQMTQSPSSLSASVGDRVTITCRASQSISSWLAWYQQKPGKAPKLLIYAASSLQSGVPSRFSGSGSGTDFTLTISSLQPEDFATYYCQQANSFPLTFGGGTKVEIK

SEQ ID NO: 109820 - protein, 107 aa, Homo sapiens
DIQMTQSPSSLSASVGDRVTITCRASQSISSWLAWYQQKPGKAPKLLIYAASTLQSGVPSRFSGSGSGTDFTLTISSLQPEDFATYYCQQSYSIPLTFGGGTKVEIK

SEQ ID NO: 109821 - protein, 107 aa, Homo sapiens
DIQMTQSPSSLSASVGDRVTITCRASQGISNYLNWYQQKPGKAPKLLIYYASSLQSGVPSRFSGSGSGTDFTLTISSLQPEDFATYYCQQTYMMPYTFGQGTKVEIK

SEQ ID NO: 109822 - protein, 107 aa, Homo sapiens
DIQMTQSPSSLSASVGDRVTITCRASQSISSYLNWYQQKPGKAPKLLIYGASSLQSGVPSRFSGSGSGTDFTLTISSLQPEDFATYYCQQSYITPWTFGQGTKVEIK

SEQ ID NO: 109823 - protein, 107 aa, Homo sapiens
DIQMTQSPSSLSASVGDRVTITCRASQGISNYLAWYQQKPGKAPKLLIYAASSLQSGVPSRFSGSGSGTDFTLTISSLQPEDFATYYCQQSYITPYTFGQGTKLEIK

SEQ ID NO: 109824 - protein, 113 aa, Homo sapiens
DIVMTQSPDSLAVSLGERATINCKTSQSVLYRPNNENYLAWYQQKPGQPPKLLIYQASIREPGVPDRFSGSGSGTDFTLTISSLQAEDVAVYYCQQYYTTPYTFGQGTKLEIK

SEQ ID NO: 109825 - protein, 107 aa, Homo sapiens
DIQMTQSPSSLSASVGDRVTITCRASQSISRFLNWYQQKPGKAPKLLIYGASRPQSGVPSRFSGSGSGTDFTLTISSLQPEDFATYYCQQSYSTPLTFGQGTKVEIK

SEQ ID NO: 109826 - protein, 112 aa, Homo sapiens
DIVMTQSPLSLPVTPGEPASISCRSSQSLLHSNGYNYLDWYLQKPGQSPQLLIYLGSHRASGVPDRFSGSGSGTDFTLKISRVEAEDVGVYYCMQALQTPLTFGGGTKVEIK

SEQ ID NO: 109827 - protein, 107 aa, Homo sapiens
EIVMTQSPATLSVSPGERATLSCRASQSVSSNLAWYQQKPGQAPRLLIYAASARASGIPARFSGSGSGTEFTLTISSLQSEDFAVYYCQQYGSWPRTFGQGTKVEIK

SEQ ID NO: 109828 - protein, 107 aa, Homo sapiens
DIQMTQSPSSLSASVGDRVTITCRASQSISSYLNWYQQKPGKAPKLLIYGASRLQSGVPSRFSGSGSGTDFTLTISSLQPEDFATYYCQQSYSTPVTFGQGTKVEIK

SEQ ID NO: 109829 - protein, 112 aa, Homo sapiens
DIVMTQSPLSLPVTPGEPASISCRSSQSLLHSNGYNYLDWYLQKPGQSPQLLIYLGSNRASGVPDRFSGSGSGTDFTLKISRVEAEDVGVYYCMQALQTPYTFGQGTKVEIK

SEQ ID NO: 109830 - protein, 107 aa, Homo sapiens
DIQMTQSPSSLSASVGDRVTITCQASEDISNHLNWYQQKPGKAPKLLIYDALSLQSGVPSRFSGSGSGTDFTLTISSLQPEDFATYYCQQANSFPFTFGPGTKVDIK

SEQ ID NO: 109831 - protein, 112 aa, Homo sapiens
DIVMTQSPLSLPVTPGEPASISCRSSQSLLHSNGYNYLDWYLQKPGQSPQLLIYLGSNRASGVPDRFSGSGSGTDFTLKISRVEAEDVGVYYCMQALQTPLTFGQGTKVEIK

SEQ ID NO: 109832 - protein, 107 aa, Homo sapiens [sequence omitted]

SEQ ID NO: 109833 - protein, 528 aa, Homo sapiens; identical to SEQ ID NO: 109463

SEQ ID NO: 109834 - protein, 16 aa, Homo sapiens
CARDDYGDYVAYFQHW

SEQ ID NO: 109835 - protein, 14 aa, Homo sapiens [sequence omitted]

SEQ ID NO: 109836 - protein, 17 aa, Homo sapiens
CARVYDFWSVLSGFDIW

SEQ ID NO: 109837 - protein, 19 aa, Homo sapiens
CARVEQGYDIYYYYYMDVW

SEQ ID NO: 109838 - protein, 16 aa, Homo sapiens
CARSYDYGDYLNFDYW

SEQ ID NO: 109839 - protein, 18 aa, Homo sapiens
CARASGSGYYYYYGMDVW

SEQ ID NO: 109840 - protein, 13 aa, Homo sapiens
CAASTWIQPFDYW

SEQ ID NO: 109841 - protein, 17 aa, Homo sapiens
CASNGNYYGSGSYYNYW

SEQ ID NO: 109842 - protein, 17 aa, Homo sapiens
CARAVYYDFWSGPFDYW

SEQ ID NO: 109843 - protein, 16 aa, Homo sapiens
CAKGGIYYGSGSYPSW

SEQ ID NO: 109844 - protein, 11 aa, Homo sapiens [sequence omitted]

SEQ ID NO: 109845 - protein, 18 aa, Homo sapiens
CARGLYGDYFLYYGMDVW

SEQ ID NO: 109846 - protein, 19 aa, Homo sapiens
CARGLLGFGEFLTYGMDVW

SEQ ID NO: 109847 - protein, 19 aa, Homo sapiens
CARDRDSSWTYYYYGMDVW

SEQ ID NO: 109848 - protein, 18 aa, Homo sapiens
CARGLYGDYFLYYGMDVW

SEQ ID NO: 109849 - protein, 21 aa, Homo sapiens
CARGDYYDSSGYYFPVYFDYW

SEQ ID NO: 109850 - protein, 19 aa, Homo sapiens
CAKDPFWSGHYYYYGMDVW

SEQ ID NO: 109851 - protein, 10 aa, Homo sapiens
CQQNYNSVTF

SEQ ID NO: 109852 - protein, 11 aa, Homo sapiens [sequence omitted]

SEQ ID NO: 109853 - protein, 11 aa, Homo sapiens
CGQSYSTPPTF

SEQ ID NO: 109854 - protein, 11 aa, Homo sapiens [sequence omitted]

SEQ ID NO: 109855 - protein, 11 aa, Homo sapiens [sequence omitted]

SEQ ID NO: 109856 - protein, 11 aa, Homo sapiens [sequence omitted]

SEQ ID NO: 109857 - protein, 11 aa, Homo sapiens [sequence omitted]

SEQ ID NO: 109858 - protein, 11 aa, Homo sapiens
CQQYSTYPITI

SEQ ID NO: 109859 - protein, 11 aa, Homo sapiens [sequence omitted]

SEQ ID NO: 109860 - protein, 11 aa, Homo sapiens [sequence omitted]

SEQ ID NO: 109861 - protein, 11 aa, Homo sapiens [sequence omitted]

SEQ ID NO: 109862 - protein, 11 aa, Homo sapiens [sequence omitted]

SEQ ID NO: 109863 - protein, 11 aa, Homo sapiens [sequence omitted]

SEQ ID NO: 109864 - protein, 11 aa, Homo sapiens [sequence omitted]

SEQ ID NO: 109865 - protein, 11 aa, Homo sapiens [sequence omitted]

SEQ ID NO: 109866 - protein, 11 aa, Homo sapiens [sequence omitted]

SEQ ID NO: 109867 - protein, 11 aa, Homo sapiens [sequence omitted]

SEQ ID NO: 109868 - protein, 121 aa, Homo sapiens
QVQLVQSGAEVKKPGASVKVSCKASGGTFSRSAITWVRQAPGQGLEWMGWINPNSGATNYAQKFQGRVTMTRDTSTSTVYMELSSLRSEDTAVYYCARDDYGDYVAYFQHWGQGTLVTVSS

SEQ ID NO: 109869 - protein, 119 aa, Homo sapiens
QVQLVQSGAEVKKPGASVKVSCKASGYPFIGQYLHWVRQAPGQGLEWMGIINPSGDSATYAQKFQGRVTMTRDTSTSTVYMELSSLRSEDTAVYYCARDLSYYYGMDVWGQGTTVTVSS

SEQ ID NO: 109870 - protein, 122 aa, Homo sapiens
QVQLVQSGAEVKKPGASVKVSCKASGYTFTNYYMHWVRQAPGQGLEWMGWMNPIGGGTGYAQKFQGRVTMTRDTSTSTVYMELSSLRSEDTAVYYCARVYDFWSVLSGFDIWGQGTLVTVSS

SEQ ID NO: 109871 - protein, 124 aa, Homo sapiens
EVQLLESGGGLVQPGGSLRLSCAASGFTFSDYYMSWVRQAPGKGLEWVSGINWNGGSTGYADSVKGRFTISRDNSKNTLYLQMNSLRAEDTAVYYCARVEQGYDIYYYYYMDVWGKGTTVTVSS

SEQ ID NO: 109872 - protein, 121 aa, Homo sapiens
QVQLVQSGAEVKKPGASVKVSCKASGGTLSSYPINWVRQAPGQGLEWMGWISTYSGHADYAQKLQGRVTMTRDTSTSTVYMELSSLRSEDTAVYYCARSYDYGDYLNFDYWGQGTLVTVSS

SEQ ID NO: 109873 - protein, 123 aa, Homo sapiens
EVQLLESGGGLVQPGGSLRLSCAASGFTFSSYWMSWVRQAPGKGLEWVSSISGRGDNTYYADSVKGRFTISRDNSKNTLYLQMNSLRAEDTAVYYCARASGSGYYYYYGMDVWGQGTTVTVSS

SEQ ID NO: 109874 - protein, 118 aa, Homo sapiens
QVQLVQSGAEVKKPGASVKVSCKASGYTFGNYFMHWVRQAPGQGLEWMGMVNPSGGSETFAQKFQGRVTMTRDTSTSTVYMELSSLRSEDTAVYYCAASTWIQPFDYWGQGTLVTVSS

SEQ ID NO: 109875 - protein, 122 aa, Homo sapiens
EVQLLESGGGLVQPGGSLRLSCAASGFDFSIYSMNWVRQAPGKGLEWVSAISGSGGSTYYADSVKGRFTISRDNSKNTLYLQMNSLRAEDTAVYYCASNGNYYGSGSYYNYWGQGTLVTVSS

SEQ ID NO: 109876 - protein, 122 aa, Homo sapiens
QVQLVQSGAEVKKPGASVKVSCKASGYTLTTYYMHWVRQAPGQGLEWMGWINPNSGGTNYAQKFQGRVTMTRDTSTSTVYMELSSLRSEDTAVYYCARAVYYDFWSGPFDYWGQGTLVTVSS

SEQ ID NO: 109877 - protein, 121 aa, Homo sapiens
QVQLVQSGAEVKKPGASVKVSCKASGYTFTSYYMHWVRQAPGQGLEWMGWINPYSGGTNYAQKFQGRVTMTRDTSTSTVYMELSSLRSEDTAVYYCAKGGIYYGSGSYPSWGQGTLVTVSS

SEQ ID NO: 109878 - protein, 116 aa, Homo sapiens
QVQLVQSGAEVKKPGSSVKVSCKASGGTFSSYGVSWVRQAPGQGLEWMGWISPYSGNTDYAQKFQGRVTITADESTSTAYMELSSLRSEDTAVYYCARGLYYMDVWGKGTTVTVSS

SEQ ID NO: 109879 - protein, 123 aa, Homo sapiens
QVQLVQSGAEVKKPGASVKVSCKASGYTFSNMYLHWVRQAPGQGLEWMGWINPNTGDTNYAQTFQGRVTMTRDTSTSTVYMELSSLRSEDTAVYYCARGLYGDYFLYYGMDVWGQGTKVTVSS

SEQ ID NO: 109880 - protein, 124 aa, Homo sapiens
QVQLVQSGAEVKKPGASVKVSCKASGYTFTSYYMHWVRQAPGQGLEWMGWMNPNSGNTGYAQKFQGRVTMTRDTSTSTVYMELSSLRSEDTAVYYCARGLLGFGEFLTYGMDVWGQGTLVTVSS

SEQ ID NO: 109881 - protein, 124 aa, Homo sapiens
QVQLVQSGAEVKKPGASVKVSCKASGYTFTGYYIHWVRQAPGQGLEWMGVINPSGGSTTYAQKLQGRVTMTRDTSTSTVYMELSSLRSEDTAVYYCARDRDSSWTYYYYGMDVWGQGTTVTVSS

SEQ ID NO: 109882 - protein, 123 aa, Homo sapiens
QVQLVQSGAEVKKPGASVKVSCKASGYTFTSNYMHWVRQAPGQGLEWMGWMNPNSGNTGYAQKFQGRVTMTRDTSTSTVYMELSSLRSEDTAVYYCARGLYGDYFLYYGMDVWGQGTTVTVSS

SEQ ID NO: 109883 - protein, 125 aa, Homo sapiens
QVQLVQSGAEVKKPGASVKVSCKASGGTFSSHAISWVRQAPGQGLEWMGVIIPSGGTSYTQKFQGRVTMTRDTSTSTVYMELSSLRSEDTAVYYCARGDYYDSSGYYFPVYFDYWGQGTLVTVSS

SEQ ID NO: 109884 - protein, 124 aa, Homo sapiens
QVQLVQSGAEVKKPGASVKVSCKASGYTFTSYAMNWVRQAPGQGLEWMGWINPNSGGTNYAQKFQGRVTMTRDTSTSTVYMELSSLRSEDTAVYYCARDPFWSGHYYYYGMDVWGQGTTVTVSS

SEQ ID NO: 109885 - protein, 106 aa, Homo sapiens
DIQMTQSPSSLSASVGDRVTITCRASQSITSYLNWYQQKPGKAPKLLIYDASNLETGVPSRFSGSGSGTDFTLTISSLQPEDFATYYCQQNYNSVTFGQGTKLEIK

SEQ ID NO: 109886 - protein, 107 aa, Homo sapiens
DIQMTQSPSSLSASVGDRVTITCWASQGISSYLAWYQQKPGKAPKLLIYAASSLQSGVPSRFSGSGSGTDFTLTISSLQPEDFATYYCQQSYNTPWTFGPGTKVDIK

SEQ ID NO: 109887 - protein, 107 aa, Homo sapiens
DIQMTQSPSSLSASVGDRVTITCRASQAISNSLAWYQQKPGKAPKLLIYAASTLQSGVPSRFSGSGSGTDFTLTISSLQPEDFATYYCGQSYSTPPTFGQGTKLEIK

SEQ ID NO: 109888 - protein, 107 aa, Homo sapiens
DIQMTQSPSSLSASVGDRVTITCRASQSISSYLNWYQQKPGKAPKLLIYKASSLESGVPSRFSGSGSGTDFTLTISSLQPEDFATYYCQQSYSAPYTFGPGTKVDIK

SEQ ID NO: 109889 - protein, 107 aa, Homo sapiens
DIQMTQSPSSLSASVGDRVTITCQASQDISNYLNWYQQKPGKAPKLLIYAASSLQSGVPSRFSGSGSGTDFTLTISSLQPEDFATYYCQQSYSIPPTFGGGTKVDIK

SEQ ID NO: 109890 - protein, 107 aa, Homo sapiens
DIQMTQSPSSLSASVGDRVTITCQASQDISNYLNWYQQKPGKAPKLLIYAASSLQSGVPSRFSGSGSGTDFTLTISSLQPEDFATYYCQQSYSAPYTFGGGTKVEIK

SEQ ID NO: 109891 - protein, 107 aa, Homo sapiens
DIQMTQSPSSLSASVGDRVTITCRASQGINSYLAWYQQKPGKAPKLLIYDASNLETGVPSRFSGSGSGTDFTLTISSLQPEDFATYYCQQHNSYPPTFGQGTKLEIK

SEQ ID NO: 109892 - protein, 107 aa, Homo sapiens
DIQMTQSPSSLSASVGDRVTITCRASQSISRWLAWYQQKPGKAPKLLIYAASSLQSGVPSRFSGSGSGTDFTLTISSLQPEDFATYYCQQYSTYPITIGQGTKVEIK

SEQ ID NO: 109893 - protein, 107 aa, Homo sapiens
DIQMTQSPSSLSASVGDRVTITCRASQGISNSLAWYQQKPGKAPKLLIYAASSLQSGVPSRFSGSGSGTDFTLTISSLQPEDFATYYCQQANSFPWTFGQGTKLEIK

SEQ ID NO: 109894 - protein, 107 aa, Homo sapiens
DIQMTQSPSSLSASVGDRVTITCRASQDVSTWLAWYQQKPGKAPKLLIYAASSLQSGVPSRFSGSGSGTDFTLTISSLQPEDFATYYCQQSHSTPQTFGQGTKVEIK

SEQ ID NO: 109895 - protein, 107 aa, Homo sapiens
DIQMTQSPSSLSASVGDRVTITCRASQSISSWLAWYQQKPGKAPKLLIYDASNLETGVPSRFSGSGSGTDFTLTISSLQPEDFATYYCQQSYSTPLTFGGGTKLEIK

SEQ ID NO: 109896 - protein, 107 aa, Homo sapiens
DIQMTQSPSSLSASVGDRVTITCRASQGISNYLAWYQQKPGKAPKLLIYAASTLQSGVPSRFSGSGSGTDFTLTISSLQPEDFATYYCQQSYSTPLTFGGGTKVEIK

SEQ ID NO: 109897 - protein, 107 aa, Homo sapiens
DIQMTQSPSSLSASVGDRVTITCRASQGISNWLAWYQQKPGKAPKLLIYAASTLQSGVPSRFSGSGSGTDFTLTISSLQPEDFATYYCQQTYSTPWTFGQGTKLEIK

SEQ ID NO: 109898 - protein, 107 aa, Homo sapiens
EIVMTQSPATLSVSPGERATLSCRASQSVGNSLAWYQQKPGQAPRLLIYGASTRATGIPARFSGSGSGTEFTLTISSLQSEDFAVYYCQQYGSSPYTFGQGTKVEIK

SEQ ID NO: 109899 - protein, 107 aa, Homo sapiens
DIQMTQSPSSLSASVGDRVTITCRASQSISGYLNWYQQKPGKAPKLLIYAASSLQSGVPSRFSGSGSGTDFTLTISSLQPEDFATYYCQQSHSTPLTFGQGTKVEIK

SEQ ID NO: 109900 - protein, 107 aa, Homo sapiens
DIQMTQSPSSLSASVGDRVTITCRASQNIYTYLNWYQQKPGKAPKLLIYDASNLETGVPSRFSGSGSGTDFTLTISSLQPEDFATYYCQQANGFPLTFGGGTKVEIK

SEQ ID NO: 109901 - protein, 107 aa, Homo sapiens [sequence omitted]

SEQ ID NO: 109902 - protein, 19 aa, Homo sapiens
CARDQDTIFGVVITWFDPW

SEQ ID NO: 109903 - protein, 14 aa, Homo sapiens
CARDKVYGDGFDPW

SEQ ID NO: 109904 - protein, 11 aa, Homo sapiens
CAREDDSMDVW

SEQ ID NO: 109905 - protein, 11 aa, Homo sapiens
CARDSSGLDPW

SEQ ID NO: 109906 - protein, 11 aa, Homo sapiens [sequence omitted]

SEQ ID NO: 109907 - protein, 27 aa, Homo sapiens
CARDAHQYYDFWSGYYSGTYYYGMDVW

SEQ ID NO: 109908 - protein, 15 aa, Homo sapiens
CAREQWPSYWYFDLW

SEQ ID NO: 109909 - protein, 15 aa, Homo sapiens [sequence omitted]

SEQ ID NO: 109910 - protein, 19 aa, Homo sapiens
CARGSGDPNYYYYYGLDVW

SEQ ID NO: 109911 - protein, 12 aa, Homo sapiens
CARDTGDHFDYW

SEQ ID NO: 109912 - protein, 11 aa, Homo sapiens
CARAENGMDVW

SEQ ID NO: 109913 - protein, 12 aa, Homo sapiens
CARDPGGYMDVW

SEQ ID NO: 109914 - protein, 11 aa, Homo sapiens [sequence omitted]

SEQ ID NO: 109915 - protein, 12 aa, Homo sapiens
CARDMGDAFDIW

SEQ ID NO: 109916 - protein, 11 aa, Homo sapiens
CAREEDGMDVW

SEQ ID NO: 109917 - protein, 12 aa, Homo sapiens
CARDTGDHFDYW

SEQ ID NO: 109918 - protein, 19 aa, Homo sapiens
CARGEYSSGFFFVGWFDLW

SEQ ID NO: 109919 - protein, 13 aa, Homo sapiens
CARETGDDAFDIW

SEQ ID NO: 109920 - protein, 11 aa, Homo sapiens [sequence omitted]

SEQ ID NO: 109921 - protein, 11 aa, Homo sapiens
CQQAEAFPYTF

SEQ ID NO: 109922 - protein, 11 aa, Homo sapiens [sequence omitted]

SEQ ID NO: 109923 - protein, 11 aa, Homo sapiens [sequence omitted]

SEQ ID NO: 109924 - protein, 11 aa, Homo sapiens
CHQTYSTPLTF

SEQ ID NO: 109925 - protein, 11 aa, Homo sapiens
CQQAYSFPWTF

SEQ ID NO: 109926 - protein, 11 aa, Homo sapiens [sequence omitted]

SEQ ID NO: 109927 - protein, 11 aa, Homo sapiens [sequence omitted]

SEQ ID NO: 109928 - protein, 11 aa, Homo sapiens [sequence omitted]

SEQ ID NO: 109929 - protein, 11 aa, Homo sapiens [sequence omitted]

SEQ ID NO: 109930 - protein, 11 aa, Homo sapiens [sequence omitted]

SEQ ID NO: 109931 - protein, 10 aa, Homo sapiens
CQQSYGVPTF

SEQ ID NO: 109932 - protein, 11 aa, Homo sapiens [sequence omitted]

SEQ ID NO: 109933 - protein, 11 aa, Homo sapiens [sequence omitted]

SEQ ID NO: 109934 - protein, 11 aa, Homo sapiens [sequence omitted]

SEQ ID NO: 109935 - protein, 11 aa, Homo sapiens [sequence omitted]

SEQ ID NO: 109936 - protein, 11 aa, Homo sapiens
CMQTLKTPLSF

SEQ ID NO: 109937 - protein, 11 aa, Homo sapiens [sequence omitted]

SEQ ID NO: 109938 - protein, 124 aa, Homo sapiens
EVQLLESGGGLVKPGGSLRLSCAASGFTFSSYWMSWVRQAPGKGLEWVSGISARSGRTYYADSVKGRFTISRDDSKNTLYLQMNSLKTEDTAVYYCARDQDTIFGVVITWFDPWGQGTLVTVSS

SEQ ID NO: 109939 - protein, 119 aa, Homo sapiens
QVQLVQSGAEVKKPGASVKVSCKASGYTFTSYYMHWVRQAPGQGLEWMGIIHPGGGTTSYAQKFQGRVTMTRDTSTSTVYMELSSLRSEDTAVYYCARDKVYGDGFDPWGQGTLVTVSS

SEQ ID NO: 109940 - protein, 116 aa, Homo sapiens
QVQLVQSGAEVKKPGASVKVSCKASGYIFTGYYMHWVRQAPGQGLEWMGMIGPSDGSTSYAQKFQGRVTMTRDTSTSTVYMELSSLRSEDTAVYYCAREDDSMDVWGKGTTVTVSS

SEQ ID NO: 109941 - protein, 116 aa, Homo sapiens
QVQLVQSGAEVKKPGASVKVSCKASGYTFIGYYMHWVRQAPGQGLEWMGMIGPSDGSTSYAQKFQGRVTMTRDTSTSTVYMELSSLRSEDTAVYYCARDSSGLDPWGQGTLVTVSS

SEQ ID NO: 109942 - protein, 116 aa, Homo sapiens
QVQLVQSGAEVKKPGASVKVSCKASGYTFTGYYMHWVRQAPGQGLEWMGMIGPSDGSTSYAQKFQGRVTMTRDTSTSTVYMELSSLRSEDTAVYYCARGVGNLDYWGQGTLVTVSS

SEQ ID NO: 109943 - protein, 132 aa, Homo sapiens
QVQLVQSGAEVKKPGASVKVSCKASGVTFSTSAISWVRQAPGQGLEWMGWISPYNGNTDYAQMLQGRVTMTRDTSTSTVYMELSSLRSEDTAVYYCARDAHQYYDFWSGYYSGTYYYGMDVWGQGTTVTVSS

SEQ ID NO: 109944 - protein, 120 aa, Homo sapiens
QVQLVQSGAEVKKPGASVKVSCKASGGTFSNSIINWVRQAPGQGLEWMGWMNPNSGNTNYAQKFQGRVTMTRDTSTSTVYMELSSLRSEDTAVYYCAREQWPSYWYFDLWGRGTLVTVSS

SEQ ID NO: 109945 - protein, 120 aa, Homo sapiens
QVQLVQSGAEVKKPGASVKVSCKASGGTFSTHDINWVRQAPGQGLEWMGVINPSGGSAIYAQKFQGRVTMTRDTSTSTVYMELSSLRSEDTAVYYCARDRGYSYGYFDYWGQGTLVTVSS

SEQ ID NO: 109946 - protein, 124 aa, Homo sapiens
QVQLVQSGAEVKKPGASVKVSCKASGNTFIGYYVHWVRQAPGQGLEWVGIINPNGGSISYAQKFQGRVTMTRDTSTSTVYMELSSLRSEDTAVYYCARGSGDPNYYYYYGLDVWGQGTTVTVSS

SEQ ID NO: 109947 - protein, 117 aa, Homo sapiens
QVQLVQSGAEVKKPGASVKVSCKASGYTLSYYYMHWVRQAPGQGLEWMGMIGPSDGSTSYAQRFQGRVTMTRDTSTGTVYMELSSLRSEDTAVYYCARDTGDHFDYWGQGTLVTVSS

SEQ ID NO: 109948 - protein, 116 aa, Homo sapiens
QVQLVQSGAEVKKPGASVKVSCKASGYTFTGYYMHWVRQAPGQGLEWMGIIGPSDGSTTYAQKFQGRVTMTRDTSTSTVYMELSSLRSEDTAVYYCARAENGMDVWGQGTTVTVSS

SEQ ID NO: 109949 - protein, 117 aa, Homo sapiens
QVQLVQSGAEVKKPGASVKVSCKASGYTFTGYYVHWVRQAPGQGLEWMGIIAPSDGSTNYAQKFQGRVTMTRDTSTSTVYMELSSLRSEDTAVYYCARDPGGYMDVWGKGTTVTVSS

SEQ ID NO: 109950 - protein, 116 aa, Homo sapiens
QVQLVQSGAEVKKPGASVKVSCKASGYTFTGYYLHWVRQAPGQGLEWMGMIGPSDGSTSYAQKFQGRVTMTRDTSTSTVYMELSSLRSEDTAVYYCARDGDAFDIWGQGTMVTVSS

SEQ ID NO: 109951 - protein, 117 aa, Homo sapiens
QVQLVQSGAEVKKPGSSVKVSCKASGYTFTGYYMHWVRQAPGQGLEWMGRISPSDGSTTYAPKFQGRVTITADESTSTAYMELSSLRSEDTAVYYCARDMGDAFDIWGQGTTVTVSS

SEQ ID NO: 109952 - protein, 116 aa, Homo sapiens
QVQLVQSGAEVKKPGASVKVSCKASGYTFTGYYMHWVRQAPGQGLEWMGMIGPSDGSTSYAQRFQGRVTMTRDTSTSTVYMELSSLRSEDTAVYYCAREEDGMDVWGQGTTVTVSS

SEQ ID NO: 109953 - protein, 117 aa, Homo sapiens; identical to SEQ ID NO: 109947

SEQ ID NO: 109954 - protein, 124 aa, Homo sapiens
QVQLVQSGAEVKKPGSSVKVSCKASGGTFNNFAISWVRQAPGQGLEWMGGIIPIFDATNYAQKFQGRVTFTADESTSTAYMELSSLRSEDTAVYYCARGEYSSGFFFVGWFDLWGRGTQVTVSS

SEQ ID NO: 109955 - protein, 118 aa, Homo sapiens
QVQLVQSGAEVKKPGASVKVSCKASGYNFTGYYMHWVRQAPGQGLEWMGIIAPSDGSTNYAQKFQGRVTMTRDTSTSTVYMELSSLRSEDTAVYYCARETGDDAFDIWGQGTMVTVSS

SEQ ID NO: 109956 - protein, 107 aa, Homo sapiens
DIQMTQSPSSLSASVGDRVTITCRASQGISNYLAWYQQKPGKAPKLLIYAASSLQGGVPSRFSGSGSGTDFTLTISSLQPEDFATYYCQQYFTTPYTFGQGTKLEIK

SEQ ID NO: 109957 - protein, 107 aa, Homo sapiens
DIQMTQSPSSLSASVGDRVTITCRASQSISRWLAWYQQKPGKAPKLLIFDASRLQSGVPSRFSGSGSGTDFTLTISSLQPEDFATYYCQQAEAFPYTFGQGTKVEIK

SEQ ID NO: 109958 - protein, 107 aa, Homo sapiens
DIQMTQSPSSLSASVGDRVTITCRASQSISSYLNWYQQKPGKAPKLLIYAASSLQSGVPSRFSGSGSGTDFTLTISSLQPEDFATYYCQQSYSTPITFGQGTRLEIK

SEQ ID NO: 109959 - protein, 107 aa, Homo sapiens
DIQMTQSPSSLSASVGDRVTITCRASQSISNYLNWYQQKPGKAPKLLIYKASSLESGVPSRFSGSGSGTDFTLTISSLQPEDFATYYCQQSYIIPYTFGQGTKLEIK

SEQ ID NO: 109960 - protein, 107 aa, Homo sapiens
DIQMTQSPSSLSASVGDRVTITCRASQSISNYLNWYQQKPGKAPKLLIYAASSLQSGVPSRFSGSGSGTDFTLTISSLQPEDFATYYCHQTYSTPLTFGQGTKVEIK

SEQ ID NO: 109961 - protein, 107 aa, Homo sapiens
DIQMTQSPSSLSASVGDRVTITCRASQGISNYLAWYQQKPGKAPKLLIYSASNLQSGVPSRFSGSGSGTDFTLTISSLQPEDFATYYCQQAYSFPWTFGQGTKVEIK

SEQ ID NO: 109962 - protein, 107 aa, Homo sapiens
DIQMTQSPSSLSASVGDRVTITCRASQNISSYLNWYQQKPGKAPKLLIYAASSLQSGVPSRFSGSGSGTDFTLTISSLQPEDFATYYCQQGYSTPLTFGQGTRLEIK

SEQ ID NO: 109963 - protein, 107 aa, Homo sapiens
DIQMTQSPSSLSASVGDRVTITCRASQDISRYLAWYQQKPGKAPKLLIYDASNLETGVPSRFSGSGSGTDFTLTISSLQPEDFATYYCQQANSFPRTFGQGTKVEIK

SEQ ID NO: 109964 - protein, 107 aa, Homo sapiens
DIQMTQSPSSLSASVGDRVTITCQASQDISNYLNWYQQKPGKAPKLLIYAASNLQSGVPSRFSGSGSGTDFTLTISSLQPEDFATYYCQQANSLPYTFGQGTKVEIK

SEQ ID NO: 109965 - protein, 107 aa, Homo sapiens
DIQMTQSPSSLSASVGDRVTITCRASQSISSYLNWYQQKPGKAPKLLIYAASTLQNGVPSRFSGSGSGTDFTLTISSLQPEDFATYYCQQSYSTPFTFGPGTKVDIK

SEQ ID NO: 109966 - protein, 107 aa, Homo sapiens
DIQMTQSPSSLSASVGDRVTITCRASQRISSYLNWYQQKPGKAPKLLIYSASTLQSGVPSRFSGSGSGTDFTLTISSLQPEDFATYYCQQSYSTPFTFGPGTKVDIK

SEQ ID NO: 109967 - protein, 106 aa, Homo sapiens
DIQMTQSPSSLSASVGDRVTITCRASQSISSYLAWYQQKPGKAPKLLIYDASKLETGVPSRFSGSGSGTDFTLTISSLQPEDFATYYCQQSYGVPTFGQGTKLEIK

SEQ ID NO: 109968 - protein, 107 aa, Homo sapiens
DIQMTQSPSSLSASVGDRVTITCRASQGISSWLAWYQQKPGKAPKLLIYDASNLETGVPSRFSGSGSGTDFTLTISSLQPEDFATYYCQQSYSTPLTFGGGTKVEIK

SEQ ID NO: 109969 - protein, 107 aa, Homo sapiens [sequence omitted]

SEQ ID NO: 109970 - protein, 107 aa, Homo sapiens
DIQMTQSPSSLSASVGDRVTITCRASQGISTYLAWYQQKPGKAPKLLIYDASSLQSGVPSRFSGSGSGTDFTLTISSLQPEDFATYYCQQYYSYPWTFGQGTRLEIK

SEQ ID NO: 109971 - protein, 107 aa, Homo sapiens; identical to SEQ ID NO: 109965

SEQ ID NO: 109972 - protein, 112 aa, Homo sapiens
DIVMTQSPLSLPVTPGEPASISCRSSQSLLHSNGYNYLDWYLQKPGQSPQLLIYLGSNRASGVPDRFSGSGSGTDFTLKISRVEAEDVGVYYCMQTLKTPLSFGGGTKVEIK

SEQ ID NO: 109973 - protein, 107 aa, Homo sapiens [sequence omitted]

SEQ ID NO: 109974 - protein, 18 aa, Homo sapiens
CARDGYDFWSGYTSDDYW

SEQ ID NO: 109975 - protein, 9 aa, Homo sapiens
CASDYGDYR

SEQ ID NO: 109976 - protein, 20 aa, Homo sapiens
CARDLMTTVVTPGDYGMDVW

SEQ ID NO: 109977 - protein, 14 aa, Homo sapiens
CARQDGGAFAFDIW

SEQ ID NO: 109978 - protein, 14 aa, Homo sapiens [sequence omitted]

SEQ ID NO: 109979 - protein, 19 aa, Homo sapiens
CARALIFGVPLLPYGMDVW

SEQ ID NO: 109980 - protein, 20 aa, Homo sapiens
CAKDLATVGEPYYYYGMDVW

SEQ ID NO: 109981 - protein, 20 aa, Homo sapiens
CARLWFGELHYYYYYGMDVW

SEQ ID NO: 109982 - protein, 10 aa, Homo sapiens
CHHYGRSHTF

SEQ ID NO: 109983 - protein, 11 aa, Homo sapiens
CQQANAFPPTF

SEQ ID NO: 109984 - protein, 11 aa, Homo sapiens [sequence omitted]

SEQ ID NO: 109985 - protein, 11 aa, Homo sapiens
CQQSYSTPPTF

SEQ ID NO: 109986 - protein, 11 aa, Homo sapiens [sequence omitted]

SEQ ID NO: 109987 - protein, 11 aa, Homo sapiens [sequence omitted]

SEQ ID NO: 109988 - protein, 11 aa, Homo sapiens [sequence omitted]

SEQ ID NO: 109989 - protein, 11 aa, Homo sapiens
CMQGSHWPPSF

SEQ ID NO: 109990 - protein, 122 aa, Homo sapiens
QVQLVQSGAEVKKPGASVKVSCKASGGTFSNYGISWVRQAPGQGLEWMGIINPGGSTSYAQKFQGRVTMTRDTSTSTVYMELSSLRSEDTAVYYCARDGYDFWSGYTSDDYWGQGTLVTVSS

SEQ ID NO: 109991 - protein, 114 aa, Homo sapiens
EVQLLESGGGLVQPGGSLRLSCAASGFTFSSYAMHWVRQAPGKGLEWVSGISGSGGSTYYADSVKGRFTISRDNSKNTLYLQMNSLRAEDTAVYYCASDYGDYRGQGTLVTVSS

SEQ ID NO: 109992 - protein, 125 aa, Homo sapiens
QVQLVQSGAEVKKPGASVKVSCKASGYTFSNYYIHWVRQAPGQGLEWMGWLNPNSGNTGYAQRFQGRVTMTRDTSTSTVYMELSSLRSEDTAVYYCARDLMTTVVTPGDYGMDVWGQGTTVTVSS

SEQ ID NO: 109993 - protein, 119 aa, Homo sapiens
QVQLVQSGAEVKKPGASMKVSCKASGYTFTTDGISWVRQAPGQGLEWMGRIYPHSGYTEYAKKFKGRVTMTRDTSTSTVYMELSSLRSEDTAVYYCARQDGGAFAFDIWGQGTMVTVSS

SEQ ID NO: 109994 - protein, 119 aa, Homo sapiens
QVQLVQSGAEVKKPGASVKVSCKASGYTFTSQYMHWVRQAPGQGLEWMGWISPNNGDTNYAQKFQGRVTMTRDTSTSTVYMELSSLRSEDTAVYYCARELGYYYGMDVWGQGTTVTVSS

SEQ ID NO: 109995 - protein, 124 aa, Homo sapiens
QVQLVQSGAEVKKPGSSVKVSCKASRYTFTSYDINWVRQAPGQGLEWMGRIIPMLNIANYAPKFQGRVTITADESTSTAYMELSSLRSEDTAVYYCARALIFGVPLLPYGMDVWGQGTTVTVSS

SEQ ID NO: 109996 - protein, 125 aa, Homo sapiens
EVQLLQSGGGLVQPGGSLRLSCAASGFTFSSSWMHWVRQAPGKGLEWVSFISTSSGYIYYADSVKGRFTISRDNSKNTLYLQMNSLRAEDTAVYYCAKDLATVGEPYYYYGMDVWGQGTTVTVSS

SEQ ID NO: 109997 - protein, 125 aa, Homo sapiens
QVQLVQSGAEVKKPGSSVKVSCKASGDTFNTYALSWVRQAPGQGLEWMGWMNPNSGNAGYAQKFQGRVTITADESTSTAYMELSSLRSEDTAVYYCARLWFGELHYYYYYGMDVWGQGTMVTVSS

SEQ ID NO: 109998 - protein, 107 aa, Homo sapiens
EIVMTQSPATLSVSPGERATLSCRASQSVSSSNLAWYQQKPGQAPRLLIYGASTRATGIPARFSGSGSGTEFTLTISSLQSEDFAVYYCHHYGRSHTFGQGTKVEIK

SEQ ID NO: 109999 - protein, 107 aa, Homo sapiens
DIQMTQSPSSLSASVGDRVTITCRASQDIRNDLGWYQQKPGKAPKLLIYAASSLQSGVPSRFSGSGSGTDFTLTISSLQPEDFATYYCQQANAFPPTFGQGTKVEIK

SEQ ID NO: 110000 - protein, 113 aa, Homo sapiens
DIVMTQSPDSLAVSLGERATINCKSSQSVFYSSNNKNQLAWYQQKPGQPPKLLIYWASTRESGVPDRFSGSGSGTDFTLTISSLQAEDVAVYYCQQYYSIPLTFGQGTKLEIK

SEQ ID NO: 110001 - protein, 107 aa, Homo sapiens
DIQMTQSPSSLSASVGDRVTITCQASQDIFKYLNWYQQKPGKAPKLLIYAASTLQSGVPSRFSGSGSGTDFTLTISSLQPEDFATYYCQQSYSTPPTFGQGTRLEIK

SEQ ID NO: 110002 - protein, 107 aa, Homo sapiens
DIQMTQSPSSLSASVGDRVTITCRASQSISTWLAWYQQKPGKAPKLLIYYASSLQSGVPSRFSGSGSGTDFTLTISSLQPEDFATYYCQQSYSFPYTFGQGTKVEIK

SEQ ID NO: 110003 - protein, 112 aa, Homo sapiens
DIVMTQSPLSLPVTPGEPASISCSSSQSLLHSNGYNYLDWYLQKPGQSPQLLIYLGSNRASGVPDRFSGSGSGTDFTLKISRVEAEDVGVYYCMQALQTPLTFGGGTKVEIK

SEQ ID NO: 110004 - protein, 107 aa, Homo sapiens
DIQMTQSPSSLSASVGDRVTITCQASQDISNYLNWYQQKPGKAPKLLIYSASNLRSGVPSRFSGSGSGTDFTLTISSLQPEDFATYYCQQGNTFPLTFGQGTKVEIK

SEQ ID NO: 110005 - protein, 112 aa, Homo sapiens
DIVMTQSPLSLPVTPGEPASISCRSSQSLLHSNGYNYLDWYLQKPGQSPQLLIYLGSNRASGVPDRFSGSGSGTDFTLKISRVEAEDVGVYYCMQGSHWPPSFGQGTRLEIK

SEQ ID NO: 110006 - protein, 9 aa, Homo sapiens
EVDPIGHLY

SEQ ID NO: 110007 - protein, 9 aa, Homo sapiens
GVHGGILNK

SEQ ID NO: 110008 - protein, 10 aa, Homo sapiens
GVYDGEEHSV

SEQ ID NO: 110009 - protein, 10 aa, Homo sapiens
GEMSSNSTAL

SEQ ID NO: 110010 - protein, 118 aa, Homo sapiens; identical to SEQ ID NO: 109588

SEQ ID NO: 110011 - protein, 108 aa, Homo sapiens; identical to SEQ ID NO: 109589

SEQ ID NO: 110012 - protein, 5 aa, Homo sapiens
SYGMH

SEQ ID NO: 110013 - protein, 17 aa, Homo sapiens
IIWYDGSKKNYADSVKG

SEQ ID NO: 110014 - protein, 9 aa, Homo sapiens
GTGYNWFDP

SEQ ID NO: 110015 - protein, 12 aa, Homo sapiens
RASQSVSSSYLA

SEQ ID NO: 110016 - protein, 7 aa, Homo sapiens
GASSRAT

SEQ ID NO: 110017 - protein, 9 aa, Homo sapiens
QQYGSSPIT

SEQ ID NO: 110018 - protein, 114 aa, Homo sapiens
QVQLVESGGGVVQPGRSLRLSCAASGFTFRSYGMHWVRQAPGKGLEWVAIIWYDGSKKNYADSVKGRFTISRDNSKNTLYLQMNSLRAEDTAVYYCARGTGYNWFDPWGQGTLV

SEQ ID NO: 110019 - protein, 108 aa, Homo sapiens; identical to SEQ ID NO: 109589

SEQ ID NO: 110020 - protein, 5 aa, Homo sapiens
RYTMH

SEQ ID NO: 110021 - protein, 17 aa, Homo sapiens
YINPSRGYTNYNQKFKD

SEQ ID NO: 110022 - protein, 10 aa, Homo sapiens
YYDDHYSLDY

SEQ ID NO: 110023 - protein, 10 aa, Homo sapiens
SASSSVSYMN

SEQ ID NO: 110024 - protein, 7 aa, Homo sapiens
DTSKLAS

SEQ ID NO: 110025 - protein, 9 aa, Homo sapiens
QQWSSNPFT

SEQ ID NO: 110026 - protein, 119 aa, Homo sapiens; identical to SEQ ID NO: 109478

SEQ ID NO: 110027 - protein, 106 aa, Homo sapiens; identical to SEQ ID NO: 109605

SEQ ID NO: 110028 - protein, 9 aa, Homo sapiens
YTFTRYTMH

SEQ ID NO: 110029 - protein, 13 aa, Homo sapiens
GYINPSRGYTNYN

SEQ ID NO: 110030 - protein, 14 aa, Homo sapiens
CARYYDDHYSLDYW

SEQ ID NO: 110031 - protein, 10 aa, Homo sapiens
SASSSVSYMN

SEQ ID NO: 110032 - protein, 7 aa, Homo sapiens
DTSKLAS

SEQ ID NO: 110033 - protein, 11 aa, Homo sapiens
CQQWSSNPFTF

SEQ ID NO: 110034 - protein, 125 aa, Homo sapiens; identical to SEQ ID NO: 109483

SEQ ID NO: 110035 - protein, 109 aa, Homo sapiens; identical to SEQ ID NO: 109613

SEQ ID NO: 110036 - protein, 20 aa, Homo sapiens
FTFSTYAMNWVRQAPGKGLE

SEQ ID NO: 110037 - protein, 16 aa, Homo sapiens
TYYADSVKGRFTISRD

SEQ ID NO: 110038 - protein, 18 aa, Homo sapiens
CVRHGNFGDSYVSWFAYW

SEQ ID NO: 110039 - protein, 14 aa, Homo sapiens
GSSTGAVTTSNYAN

SEQ ID NO: 110040 - protein, 7 aa, Homo sapiens
GTNKRAP

SEQ ID NO: 110041 - protein, 11 aa, Homo sapiens
CALWYSNHWVF

SEQ ID NO: 110042 - protein, 14 aa, Homo sapiens
CARDGVRYYGMDVW

SEQ ID NO: 110043 - protein, 15 aa, Homo sapiens
CARGVRGYDRSAGYW

SEQ ID NO: 110044 - protein, 16 aa, Homo sapiens
CASHDYGDYGEYFQHW

SEQ ID NO: 110045 - protein, 21 aa, Homo sapiens
CARVSWYCSSTSCGVNWFDPW

SEQ ID NO: 110046 - protein, 15 aa, Homo sapiens
CAKVNWNDGPYFDYW

SEQ ID NO: 110047 - protein, 21 aa, Homo sapiens
CATPTNSGYYGPYYYYGMDVW

SEQ ID NO: 110048 - protein, 9 aa, Homo sapiens
CARDVMDVW

SEQ ID NO: 110049 - protein, 15 aa, Homo sapiens
CARGGSYYYYGMDVW

SEQ ID NO: 110050 - protein, 11 aa, Homo sapiens [sequence omitted]

SEQ ID NO: 110051 - protein, 11 aa, Homo sapiens [sequence omitted]

SEQ ID NO: 110052 - protein, 11 aa, Homo sapiens [sequence omitted]

SEQ ID NO: 110053 - protein, 11 aa, Homo sapiens [sequence omitted]

SEQ ID NO: 110054 - protein, 11 aa, Homo sapiens [sequence omitted]

SEQ ID NO: 110055 - protein, 11 aa, Homo sapiens [sequence omitted]

SEQ ID NO: 110056 - protein, 11 aa, Homo sapiens
CQQTYMMPYTF

SEQ ID NO: 110057 - protein, 11 aa, Homo sapiens [sequence omitted]

SEQ ID NO: 110058 - protein, 11 aa, Homo sapiens [sequence omitted]

SEQ ID NO: 110059 - protein, 11 aa, Homo sapiens [sequence omitted]

SEQ ID NO: 110060 - protein, 11 aa, Homo sapiens [sequence omitted]

SEQ ID NO: 110061 - protein, 11 aa, Homo sapiens [sequence omitted]

SEQ ID NO: 110062 - protein, 11 aa, Homo sapiens [sequence omitted]

SEQ ID NO: 110063 - protein, 11 aa, Homo sapiens [sequence omitted]

SEQ ID NO: 110064 - protein, 11 aa, Homo sapiens [sequence omitted]

SEQ ID NO: 110065 - protein, 11 aa, Homo sapiens [sequence omitted]

SEQ ID NO: 110066 - protein, 11 aa, Homo sapiens [sequence omitted]

SEQ ID NO: 110067 - protein, 14 aa, Homo sapiens
ANDCQQSYSTPLTF

SEQ ID NO: 110068 - protein, 119 aa, Homo sapiens; identical to SEQ ID NO: 109797

SEQ ID NO: 110069 - protein, 120 aa, Homo sapiens; identical to SEQ ID NO: 109798

SEQ ID NO: 110070 - protein, 121 aa, Homo sapiens; identical to SEQ ID NO: 109799

SEQ ID NO: 110071 - protein, 126 aa, Homo sapiens; identical to SEQ ID NO: 109800

SEQ ID NO: 110072 - protein, 120 aa, Homo sapiens; identical to SEQ ID NO: 109801

SEQ ID NO: 110073 - protein, 126 aa, Homo sapiens; identical to SEQ ID NO: 109802

SEQ ID NO: 110074 - protein, 114 aa, Homo sapiens; identical to SEQ ID NO: 109803

SEQ ID NO: 110075 - protein, 116 aa, Homo sapiens; identical to SEQ ID NO: 109804

SEQ ID NO: 110076 - protein, 117 aa, Homo sapiens; identical to SEQ ID NO: 109805

SEQ ID NO: 110077 - protein, 130 aa, Homo sapiens; identical to SEQ ID NO: 109806

SEQ ID NO: 110078 - protein, 116 aa, Homo sapiens; identical to SEQ ID NO: 109807

SEQ ID NO: 110079 - protein, 119 aa, Homo sapiens; identical to SEQ ID NO: 109808

SEQ ID NO: 110080 - protein, 117 aa, Homo sapiens; identical to SEQ ID NO: 109809

SEQ ID NO: 110081 - protein, 123 aa, Homo sapiens; identical to SEQ ID NO: 109810

SEQ ID NO: 110082 - protein, 118 aa, Homo sapiens; identical to SEQ ID NO: 109811

SEQ ID NO: 110083 - protein, 124 aa, Homo sapiens; identical to SEQ ID NO: 109812

SEQ ID NO: 110084 - protein, 119 aa, Homo sapiens; identical to SEQ ID NO: 109813

SEQ ID NO: 110085 - protein, 120 aa, Homo sapiens; identical to SEQ ID NO: 109814

SEQ ID NO: 110086 - protein, 112 aa, Homo sapiens; identical to SEQ ID NO: 109815

SEQ ID NO: 110087 - protein, 112 aa, Homo sapiens; identical to SEQ ID NO: 109816

SEQ ID NO: 110088 - protein, 107 aa, Homo sapiens; identical to SEQ ID NO: 109817

SEQ ID NO: 110089 - protein, 107 aa, Homo sapiens; identical to SEQ ID NO: 109818

SEQ ID NO: 110090 - protein, 107 aa, Homo sapiens; identical to SEQ ID NO: 109819

SEQ ID NO: 110091 - protein, 107 aa, Homo sapiens; identical to SEQ ID NO: 109820

SEQ ID NO: 110092 - protein, 107 aa, Homo sapiens; identical to SEQ ID NO: 109821

SEQ ID NO: 110093 - protein, 107 aa, Homo sapiens; identical to SEQ ID NO: 109822

SEQ ID NO: 110094 - protein, 107 aa, Homo sapiens; identical to SEQ ID NO: 109823

SEQ ID NO: 110095 - protein, 113 aa, Homo sapiens; identical to SEQ ID NO: 109824

SEQ ID NO: 110096 - protein, 107 aa, Homo sapiens; identical to SEQ ID NO: 109825

SEQ ID NO: 110097 - protein, 112 aa, Homo sapiens; identical to SEQ ID NO: 109826

SEQ ID NO: 110098 - protein, 107 aa, Homo sapiens; identical to SEQ ID NO: 109827

SEQ ID NO: 110099 - protein, 107 aa, Homo sapiens; identical to SEQ ID NO: 109828

SEQ ID NO: 110100 - protein, 112 aa, Homo sapiens; identical to SEQ ID NO: 109829

SEQ ID NO: 110101 - protein, 107 aa, Homo sapiens; identical to SEQ ID NO: 109830

SEQ ID NO: 110102 - protein, 112 aa, Homo sapiens; identical to SEQ ID NO: 109831

SEQ ID NO: 110103 - protein, 107 aa, Homo sapiens [sequence omitted]

SEQ ID NO: 110104 - protein, 9 aa, Homo sapiens
LLFGYPVYV

SEQ ID NO: 110105 - protein, 9 aa, Homo sapiens
GILGFVFTL

SEQ ID NO: 110106 - protein, 9 aa, Homo sapiens
FLLTRILTI

SEQ ID NO: 110107 - protein, 11 aa, Homo sapiens
YSEHPTFTSQY

SEQ ID NO: 110108 - protein, 9 aa, Homo sapiens
VSDGGPNLY

SEQ ID NO: 110109 - protein, 9 aa, Homo sapiens
ATDALMTGY

SEQ ID NO: 110110 - protein, 9 aa, Homo sapiens
IVTDFSVIK

SEQ ID NO: 110111 - protein, 9 aa, Homo sapiens
KSMREEYRK

SEQ ID NO: 110112 - protein, 10 aa, Homo sapiens
SSCSSCPLSK

SEQ ID NO: 110113 - protein, 9 aa, Homo sapiens
ATIGTAMYK

SEQ ID NO: 110114 - protein, 10 aa, Homo sapiens
AVFDRKSDAK

SEQ ID NO: 110115 - protein, 9 aa, Homo sapiens
SIIPSGPLK

SEQ ID NO: 110116 - protein, 9 aa, Homo sapiens
IPSINVHHY

SEQ ID NO: 110117 - protein, 11 aa, Homo sapiens
EPLPQGQLTAY

SEQ ID NO: 110118 - protein, 10 aa, Homo sapiens
VPLDEDFRKY

SEQ ID NO: 110119 - protein, 9 aa, Homo sapiens
RLRAEAQVK

SEQ ID NO: 110120 - protein, 9 aa, Homo sapiens
RLRPGGKKK

SEQ ID NO: 110121 - protein, 10 aa, Homo sapiens
QVPLRPMTYK

SEQ ID NO: 110122 - protein, 9 aa, Homo sapiens
TYGPVFMCL

SEQ ID NO: 110123 - protein, 9 aa, Homo sapiens
RYLKDQQLL

SEQ ID NO: 110124 - protein, 9 aa, Homo sapiens
PYLFWLAAI

SEQ ID NO: 110125 - protein, 9 aa, Homo sapiens
YTFTSYDIN

SEQ ID NO: 110126 - protein, 13 aa, Homo sapiens
GIINPRSGSTKYA

SEQ ID NO: 110127 - protein, 14 aa, Homo sapiens
CARDGVRYYGMDVW

SEQ ID NO: 110128 - protein, 16 aa, Homo sapiens
RSSQSLLHSNGYNYLD

SEQ ID NO: 110129 - protein, 7 aa, Homo sapiens
LGSYRAS

SEQ ID NO: 110130 - protein, 11 aa, Homo sapiens [sequence omitted]

SEQ ID NO: 110131 - protein, 9 aa, Homo sapiens
FVQENYLEY

SEQ ID NO: 110132 - protein, 9 aa, Homo sapiens
LVHFLLLKY

SEQ ID NO: 110133 - protein, 10 aa, Homo sapiens
MEVDPIGHLY

SEQ ID NO: 110134 - protein, 9 aa, Homo sapiens
EVDPASNTY

SEQ ID NO: 110135 - protein, 9 aa, Homo sapiens
KVLEYVIKV

SEQ ID NO: 110136 - protein, 9 aa, Homo sapiens
LVQENYLEY

SEQ ID NO: 110137 - protein, 9 aa, Homo sapiens
AFDDIATYF

SEQ ID NO: 110138 - protein, 9 aa, Homo sapiens
WVQENYLEY

SEQ ID NO: 110139 - protein, 9 aa, Homo sapiens
SLFRAVITK

SEQ ID NO: 110140 - protein, 9 aa, Homo sapiens
ALAETSYVK

SEQ ID NO: 110141 - protein, 9 aa, Homo sapiens
LYATVIHDI

SEQ ID NO: 110142 - protein, 10 aa, Homo sapiens
QLLDGFMITL

SEQ ID NO: 110143 - protein, 9 aa, Homo sapiens
STLPTTINY

SEQ ID NO: 110144 - protein, 10 aa, Homo sapiens
YPAPLESLDY

SEQ ID NO: 110145 - protein, 9 aa, Homo sapiens
ATLENLLSH

SEQ ID NO: 110146 - protein, 8 aa, Homo sapiens
DALLAQKV

SEQ ID NO: 110147 - protein, 10 aa, Homo sapiens
SESDLKHLSW

SEQ ID NO: 110148 - protein, 9 aa, Homo sapiens
TLDEYLTYL

SEQ ID NO: 110149 - protein, 9 aa, Homo sapiens
RQKRILVNL

SEQ ID NO: 110150 - protein, 9 aa, Homo sapiens
YTFTSYDIN

SEQ ID NO: 110151 - protein, 13 aa, Homo sapiens
GIINPRSGSTKYA

SEQ ID NO: 110152 - protein, 14 aa, Homo sapiens
CARDGVRYYGMDVW

SEQ ID NO: 110153 - protein, 16 aa, Homo sapiens
RSSQSLLHSNGYNYLD

SEQ ID NO: 110154 - protein, 7 aa, Homo sapiens
LGSYRAS

SEQ ID NO: 110155 - protein, 11 aa, Homo sapiens [sequence omitted]

SEQ ID NO: 110156 - protein, 9 aa, Homo sapiens
YTFTSHDIN

SEQ ID NO: 110157 - protein, 13 aa, Homo sapiens
GWMNPNSGDTGYA

SEQ ID NO: 110158 - protein, 15 aa, Homo sapiens
CARGVRGYDRSAGYW

SEQ ID NO: 110159 - protein, 16 aa, Homo sapiens
RSSQSLLHSNGYNYLD

SEQ ID NO: 110160 - protein, 7 aa, Homo sapiens
LGSSRAS

SEQ ID NO: 110161 - protein, 11 aa, Homo sapiens [sequence omitted]

SEQ ID NO: 110162 - protein, 9 aa, Homo sapiens
FSFSSYWMS

SEQ ID NO: 110163 - protein, 13 aa, Homo sapiens
SYISGDSGYTNYA

SEQ ID NO: 110164 - protein, 16 aa, Homo sapiens
CASHDYGDYGEYFQHW

SEQ ID NO: 110165 - protein, 11 aa, Homo sapiens
QASQDISNYLN

SEQ ID NO: 110166 - protein, 7 aa, Homo sapiens
AASSLQS

SEQ ID NO: 110167 - protein, 11 aa, Homo sapiens [sequence omitted]

SEQ ID NO: 110168 - protein, 9 aa, Homo sapiens
FTFSNSDMN

SEQ ID NO: 110169 - protein, 13 aa, Homo sapiens
AYISSGSSTIYYA

SEQ ID NO: 110170 - protein, 21 aa, Homo sapiens
CARVSWYCSSTSCGVNWFDPW

SEQ ID NO: 110171 - protein, 11 aa, Homo sapiens
RASQSISSWLA

SEQ ID NO: 110172 - protein, 7 aa, Homo sapiens
SASTLQS

SEQ ID NO: 110173 - protein, 11 aa, Homo sapiens [sequence omitted]

SEQ ID NO: 110174 - protein, 9 aa, Homo sapiens
FTFSNSDMN

SEQ ID NO: 110175 - protein, 13 aa, Homo sapiens
ASISSSGGYINYA

SEQ ID NO: 110176 - protein, 15 aa, Homo sapiens
CAKVNWNDGPYFDYW

SEQ ID NO: 110177 - protein, 11 aa, Homo sapiens
RASQSISSWLA

SEQ ID NO: 110178 - protein, 7 aa, Homo sapiens
AASSLQS

SEQ ID NO: 110179 - protein, 11 aa, Homo sapiens [sequence omitted]

SEQ ID NO: 110180 - protein, 9 aa, Homo sapiens
GTFSNFGVS

SEQ ID NO: 110181 - protein, 13 aa, Homo sapiens
GGIIPILGTANYA

SEQ ID NO: 110182 - protein, 21 aa, Homo sapiens
CATPTNSGYYGPYYYYGMDVW

SEQ ID NO: 110183 - protein, 11 aa, Homo sapiens
RASQSISSWLA

SEQ ID NO: 110184 - protein, 7 aa, Homo sapiens
AASTLQS

SEQ ID NO: 110185 - protein, 11 aa, Homo sapiens [sequence omitted]

SEQ ID NO: 110186 - protein, 9 aa, Homo sapiens
YTFTSYNMH

SEQ ID NO: 110187 - protein, 13 aa, Homo sapiens
GWINPNSGGTNYA

SEQ ID NO: 110188 - protein, 9 aa, Homo sapiens
CARDVMDVW

SEQ ID NO: 110189 - protein, 11 aa, Homo sapiens
RASQGISNYLN

SEQ ID NO: 110190 - protein, 7 aa, Homo sapiens
YASSLQS

SEQ ID NO: 110191 - protein, 11 aa, Homo sapiens
CQQTYMMPYTF

SEQ ID NO: 110192 - protein, 9 aa, Homo sapiens
GTFSGYLVS

SEQ ID NO: 110193 - protein, 13 aa, Homo sapiens
GWINPNSGGTNTA

SEQ ID NO: 110194 - protein, 11 aa, Homo sapiens [sequence omitted]

SEQ ID NO: 110195 - protein, 11 aa, Homo sapiens
RASQSISSYLN

SEQ ID NO: 110196 - protein, 7 aa, Homo sapiens
GASSLQS

SEQ ID NO: 110197 - protein, 11 aa, Homo sapiens [sequence omitted]

SEQ ID NO: 110198 - protein, 9 aa, Homo sapiens
YIFRNYPMH

SEQ ID NO: 110199 - protein, 13 aa, Homo sapiens
GWINPDSGGTKYA

SEQ ID NO: 110200 - protein, 12 aa, Homo sapiens
CARDNGVGVDYW

SEQ ID NO: 110201 - protein, 11 aa, Homo sapiens
RASQGISNYLA

SEQ ID NO: 110202 - protein, 7 aa, Homo sapiens
AASSLQS

SEQ ID NO: 110203 - protein, 11 aa, Homo sapiens [sequence omitted]

SEQ ID NO: 110204 - protein, 9 aa, Homo sapiens
YTFTGYYMH

SEQ ID NO: 110205 - protein, 13 aa, Homo sapiens
GWMNPNIGNTGYA

SEQ ID NO: 110206 - protein, 25 aa, Homo sapiens
CARGIADSGSYYGNGRDYYYGMDVW

SEQ ID NO: 110207 - protein, 17 aa, Homo sapiens
KTSQSVLYRPNNENYLA

SEQ ID NO: 110208 - protein, 7 aa, Homo sapiens
QASIREP

SEQ ID NO: 110209 - protein, 11 aa, Homo sapiens [sequence omitted]

SEQ ID NO: 110210 - protein, 9 aa, Homo sapiens
GTFSSYGIS

SEQ ID NO: 110211 - protein, 13 aa, Homo sapiens
GWINPNSGVTKYA

SEQ ID NO: 110212 - protein, 11 aa, Homo sapiens [sequence omitted]

SEQ ID NO: 110213 - protein, 11 aa, Homo sapiens
RASQSISRFLN

SEQ ID NO: 110214 - protein, 7 aa, Homo sapiens
GASRPQS

SEQ ID NO: 110215 - protein, 11 aa, Homo sapiens [sequence omitted]

SEQ ID NO: 110216 - protein, 9 aa, Homo sapiens
YTFTSYDIN

SEQ ID NO: 110217 - protein, 13 aa, Homo sapiens
GWINPNSGDTKYS

SEQ ID NO: 110218 - protein, 14 aa, Homo sapiens
CARDGTRYYGMDVW

SEQ ID NO: 110219 - protein, 16 aa, Homo sapiens
RSSQSLLHSNGYNYLD

SEQ ID NO: 110220 - protein, 7 aa, Homo sapiens
LGSHRAS

SEQ ID NO: 110221 - protein, 11 aa, Homo sapiens [sequence omitted]

SEQ ID NO: 110222 - protein, 9 aa, Homo sapiens
FTFSDYYMS

SEQ ID NO: 110223 - protein, 13 aa, Homo sapiens
SYISSSSSYTNYA

SEQ ID NO: 110224 - protein, 12 aa, Homo sapiens
CARDVVANFDYW

SEQ ID NO: 110225 - protein, 11 aa, Homo sapiens
RASQSVSSNLA

SEQ ID NO: 110226 - protein, 7 aa, Homo sapiens
AASARAS

SEQ ID NO: 110227 - protein, 11 aa, Homo sapiens [sequence omitted]

SEQ ID NO: 110228 - protein, 9 aa, Homo sapiens
GTFSSYAIS

SEQ ID NO: 110229 - protein, 13 aa, Homo sapiens
GWMNPDSGSTGYA

SEQ ID NO: 110230 - protein, 18 aa, Homo sapiens
CARGHSSGWYYYYGMDVW

SEQ ID NO: 110231 - protein, 11 aa, Homo sapiens
RASQSISSYLN

SEQ ID NO: 110232 - protein, 7 aa, Homo sapiens
GASRLQS

SEQ ID NO: 110233 - protein, 11 aa, Homo sapiens [sequence omitted]

SEQ ID NO: 110234 - protein, 9 aa, Homo sapiens
FTFTSYSMH

SEQ ID NO: 110235 - protein, 13 aa, Homo sapiens
SSITSFTNTMYYA

SEQ ID NO: 110236 - protein, 13 aa, Homo sapiens
CAKDLGSYGGYYW

SEQ ID NO: 110237 - protein, 16 aa, Homo sapiens
RSSQSLLHSNGYNYLD

SEQ ID NO: 110238 - protein, 7 aa, Homo sapiens
LGSNRAS

SEQ ID NO: 110239 - protein, 11 aa, Homo sapiens [sequence omitted]

SEQ ID NO: 110240 - protein, 9 aa, Homo sapiens
YTFTNYYMH

SEQ ID NO: 110241 - protein, 13 aa, Homo sapiens
GIINPSGGSTSYA

SEQ ID NO: 110242 - protein, 19 aa, Homo sapiens
CARSWFGGFNYHYYGMDVW

SEQ ID NO: 110243 - protein, 11 aa, Homo sapiens
QASEDISNHLN

SEQ ID NO: 110244 - protein, 7 aa, Homo sapiens
DALSLQS

SEQ ID NO: 110245 - protein, 11 aa, Homo sapiens [sequence omitted]

SEQ ID NO: 110246 - protein, 9 aa, Homo sapiens
YTFTSYYMH

SEQ ID NO: 110247 - protein, 13 aa, Homo sapiens
GWMNPNSGNTGYA

SEQ ID NO: 110248 - protein, 14 aa, Homo sapiens
CARELPIGYGMDVW

SEQ ID NO: 110249 - protein, 16 aa, Homo sapiens
RSSQSLLHSNGYNYLD

SEQ ID NO: 110250 - protein, 7 aa, Homo sapiens
LGSNRAS

SEQ ID NO: 110251 - protein, 11 aa, Homo sapiens [sequence omitted]

SEQ ID NO: 110252 - protein, 9 aa, Homo sapiens
GTFSSYAIS

SEQ ID NO: 110253 - protein, 13 aa, Homo sapiens
GGIIPVMGTGNYA

SEQ ID NO: 110254 - protein, 15 aa, Homo sapiens
CARGGSYYYYGMDVW

SEQ ID NO: 110255 - protein, 11 aa, Homo sapiens
RASQSISSYLN

SEQ ID NO: 110256 - protein, 7 aa, Homo sapiens
AASSLQS

SEQ ID NO: 110257 - protein, 11 aa, Homo sapiens [sequence omitted]

SEQ ID NO: 110258 - protein, 9 aa, Homo sapiens
GTFSRSAIT

SEQ ID NO: 110259 - protein, 13 aa, Homo sapiens
GWINPNSGATNYA

SEQ ID NO: 110260 - protein, 16 aa, Homo sapiens
CARDDYGDYVAYFQHW

SEQ ID NO: 110261 - protein, 11 aa, Homo sapiens
RASQSITSYLN

SEQ ID NO: 110262 - protein, 7 aa, Homo sapiens
DASNLET

SEQ ID NO: 110263 - protein, 10 aa, Homo sapiens
CQQNYNSVTF

SEQ ID NO: 110264 - protein, 9 aa, Homo sapiens
YPFIGQYLH

SEQ ID NO: 110265 - protein, 13 aa, Homo sapiens
GIINPSGDSATYA

SEQ ID NO: 110266 - protein, 14 aa, Homo sapiens [sequence omitted]

SEQ ID NO: 110267 - protein, 11 aa, Homo sapiens
WASQGISSYLA

SEQ ID NO: 110268 - protein, 7 aa, Homo sapiens
AASSLQS

SEQ ID NO: 110269 - protein, 11 aa, Homo sapiens [sequence omitted]

SEQ ID NO: 110270 - protein, 9 aa, Homo sapiens
YTFTNYYMH

SEQ ID NO: 110271 - protein, 13 aa, Homo sapiens
GWMNPIGGGTGYA

SEQ ID NO: 110272 - protein, 17 aa, Homo sapiens
CARVYDFWSVLSGFDIW

SEQ ID NO: 110273 - protein, 11 aa, Homo sapiens
RASQAISNSLA

SEQ ID NO: 110274 - protein, 7 aa, Homo sapiens
AASTLQS

SEQ ID NO: 110275 - protein, 11 aa, Homo sapiens
CGQSYSTPPTF

SEQ ID NO: 110276 - protein, 9 aa, Homo sapiens
FTFSDYYMS

SEQ ID NO: 110277 - protein, 13 aa, Homo sapiens
SGINWNGGSTGYA

SEQ ID NO: 110278 - protein, 19 aa, Homo sapiens
CARVEQGYDIYYYYYMDVW

SEQ ID NO: 110279 - protein, 11 aa, Homo sapiens
RASQSISSYLN

SEQ ID NO: 110280 - protein, 7 aa, Homo sapiens
KASSLES

SEQ ID NO: 110281 - protein, 11 aa, Homo sapiens [sequence omitted]

SEQ ID NO: 110282 - protein, 9 aa, Homo sapiens
GTLSSYPIN

SEQ ID NO: 110283 - protein, 13 aa, Homo sapiens
GWISTYSGHADYA

SEQ ID NO: 110284 - protein, 16 aa, Homo sapiens
CARSYDYGDYLNFDYW

SEQ ID NO: 110285 - protein, 11 aa, Homo sapiens
QASQDISNYLN

SEQ ID NO: 110286 - protein, 7 aa, Homo sapiens
AASSLQS

SEQ ID NO: 110287 - protein, 11 aa, Homo sapiens [sequence omitted]

SEQ ID NO: 110288 - protein, 9 aa, Homo sapiens
FTFSSYWMS

SEQ ID NO: 110289 - protein, 13 aa, Homo sapiens
SSISGRGDNTYYA

SEQ ID NO: 110290 - protein, 18 aa, Homo sapiens
CARASGSGYYYYYGMDVW

SEQ ID NO: 110291 - protein, 11 aa, Homo sapiens
QASQDISNYLN

SEQ ID NO: 110292 - protein, 7 aa, Homo sapiens
AASSLQS

SEQ ID NO: 110293 - protein, 11 aa, Homo sapiens [sequence omitted]

SEQ ID NO: 110294 - protein, 9 aa, Homo sapiens
YTFGNYFMH

SEQ ID NO: 110295 - protein, 13 aa, Homo sapiens
GMVNPSGGSETFA

SEQ ID NO: 110296 - protein, 13 aa, Homo sapiens
CAASTWIQPFDYW

SEQ ID NO: 110297 - protein, 11 aa, Homo sapiens
RASQGINSYLA

SEQ ID NO: 110298 - protein, 7 aa, Homo sapiens
DASNLET

SEQ ID NO: 110299 - protein, 11 aa, Homo sapiens [sequence omitted]

SEQ ID NO: 110300 - protein, 9 aa, Homo sapiens
FDFSIYSMN

SEQ ID NO: 110301 - protein, 13 aa, Homo sapiens
SAISGSGGSTYYA

SEQ ID NO: 110302 - protein, 17 aa, Homo sapiens
CASNGNYYGSGSYYNYW

SEQ ID NO: 110303 - protein, 11 aa, Homo sapiens
RASQSISRWLA

SEQ ID NO: 110304 - protein, 7 aa, Homo sapiens
AASSLQS

SEQ ID NO: 110305 - protein, 11 aa, Homo sapiens
CQQYSTYPITI

SEQ ID NO: 110306 - protein, 9 aa, Homo sapiens
YTLTTYYMH

SEQ ID NO: 110307 - protein, 13 aa, Homo sapiens
GWINPNSGGTNYA

SEQ ID NO: 110308 - protein, 17 aa, Homo sapiens
CARAVYYDFWSGPFDYW

SEQ ID NO: 110309 - protein, 11 aa, Homo sapiens
RASQGISNSLA

SEQ ID NO: 110310 - protein, 7 aa, Homo sapiens
AASSLQS

SEQ ID NO: 110311 - protein, 11 aa, Homo sapiens [sequence omitted]

SEQ ID NO: 110312 - protein, 9 aa, Homo sapiens
YTFTSYYMH

SEQ ID NO: 110313 - protein, 13 aa, Homo sapiens
GWINPYSGGTNYA

SEQ ID NO: 110314 - protein, 16 aa, Homo sapiens
CAKGGIYYGSGSYPSW

SEQ ID NO: 110315 - protein, 11 aa, Homo sapiens
RASQDVSTWLA

SEQ ID NO: 110316 - protein, 7 aa, Homo sapiens
AASSLQS

SEQ ID NO: 110317 - protein, 11 aa, Homo sapiens [sequence omitted]

SEQ ID NO: 110318 - protein, 9 aa, Homo sapiens
GTFSSYGVS

SEQ ID NO: 110319 - protein, 13 aa, Homo sapiens
GWISPYSGNTDYA

SEQ ID NO: 110320 - protein, 11 aa, Homo sapiens [sequence omitted]

SEQ ID NO: 110321 - protein, 11 aa, Homo sapiens
RASQSISSWLA

SEQ ID NO: 110322 - protein, 7 aa, Homo sapiens
DASNLET

SEQ ID NO: 110323 - protein, 11 aa, Homo sapiens [sequence omitted]

SEQ ID NO: 110324 - protein, 9 aa, Homo sapiens
YTFSNMYLH

SEQ ID NO: 110325 - protein, 13 aa, Homo sapiens
GWINPNTGDTNYA

SEQ ID NO: 110326 - protein, 18 aa, Homo sapiens
CARGLYGDYFLYYGMDVW

SEQ ID NO: 110327 - protein, 11 aa, Homo sapiens
RASQGISNYLA

SEQ ID NO: 110328 - protein, 7 aa, Homo sapiens
AASTLQS

SEQ ID NO: 110329 - protein, 11 aa, Homo sapiens [sequence omitted]

SEQ ID NO: 110330 - protein, 9 aa, Homo sapiens
YTFTSYYMH

SEQ ID NO: 110331 - protein, 13 aa, Homo sapiens
GWMNPNSGNTGYA

SEQ ID NO: 110332 - protein, 19 aa, Homo sapiens
CARGLLGFGEFLTYGMDVW

SEQ ID NO: 110333 - protein, 11 aa, Homo sapiens
RASQGISNWLA

SEQ ID NO: 110334 - protein, 7 aa, Homo sapiens
AASTLQS

SEQ ID NO: 110335 - protein, 11 aa, Homo sapiens [sequence omitted]

SEQ ID NO: 110336 - protein, 9 aa, Homo sapiens
YTFTGYYIH

SEQ ID NO: 110337 - protein, 13 aa, Homo sapiens
GVINPSGGSTTYA

SEQ ID NO: 110338 - protein, 19 aa, Homo sapiens
CARDRDSSWTYYYYGMDVW

SEQ ID NO: 110339 - protein, 11 aa, Homo sapiens
RASQSVGNSLA

SEQ ID NO: 110340 - protein, 7 aa, Homo sapiens
GASTRAT

SEQ ID NO: 110341 - protein, 11 aa, Homo sapiens [sequence omitted]

SEQ ID NO: 110342 - protein, 9 aa, Homo sapiens
YTFTSNYMH

SEQ ID NO: 110343 - protein, 13 aa, Homo sapiens
GWMNPNSGNTGYA

SEQ ID NO: 110344 - protein, 18 aa, Homo sapiens
CARGLYGDYFLYYGMDVW

SEQ ID NO: 110345 - protein, 11 aa, Homo sapiens
RASQSISGYLN

SEQ ID NO: 110346 - protein, 7 aa, Homo sapiens
AASSLQS

SEQ ID NO: 110347 - protein, 11 aa, Homo sapiens [sequence omitted]

SEQ ID NO: 110348 - protein, 9 aa, Homo sapiens
GTFSSHAIS

SEQ ID NO: 110349 - protein, 12 aa, Homo sapiens
GVIIPSGGTSYT

SEQ ID NO: 110350 - protein, 21 aa, Homo sapiens
CARGDYYDSSGYYFPVYFDYW

SEQ ID NO: 110351 - protein, 11 aa, Homo sapiens
RASQNIYTYLN

SEQ ID NO: 110352 - protein, 7 aa, Homo sapiens
DASNLET

SEQ ID NO: 110353 - protein, 11 aa, Homo sapiens [sequence omitted]

SEQ ID NO: 110354 - protein, 9 aa, Homo sapiens
YTFTSYAMN

SEQ ID NO: 110355 - protein, 13 aa, Homo sapiens
GWINPNSGGTNYA

SEQ ID NO: 110356 - protein, 19 aa, Homo sapiens
CAKDPFWSGHYYYYGMDVW

SEQ ID NO: 110357 - protein, 11 aa, Homo sapiens
RASQSISSYLN

SEQ ID NO: 110358 - protein, 7 aa, Homo sapiens
AASSLQS

SEQ ID NO: 110359 - protein, 11 aa, Homo sapiens [sequence omitted]

SEQ ID NO: 110360 - protein, 9 aa, Homo sapiens
FTFSSYWMS

SEQ ID NO: 110361 - protein, 13 aa, Homo sapiens
SGISARSGRTYYA

SEQ ID NO: 110362 - protein, 19 aa, Homo sapiens
CARDQDTIFGVVITWFDPW

SEQ ID NO: 110363 - protein, 11 aa, Homo sapiens
RASQGISNYLA

SEQ ID NO: 110364 - protein, 7 aa, Homo sapiens
AASSLQG

SEQ ID NO: 110365 - protein, 11 aa, Homo sapiens [sequence omitted]

SEQ ID NO: 110366 - protein, 9 aa, Homo sapiens
YTFTSYYMH

SEQ ID NO: 110367 - protein, 13 aa, Homo sapiens
GIIHPGGGTTSYA

SEQ ID NO: 110368 - protein, 14 aa, Homo sapiens
CARDKVYGDGFDPW

SEQ ID NO: 110369 - protein, 11 aa, Homo sapiens
RASQSISRWLA

SEQ ID NO: 110370 - protein, 7 aa, Homo sapiens
DASRLQS

SEQ ID NO: 110371 - protein, 11 aa, Homo sapiens
CQQAEAFPYTF

SEQ ID NO: 110372 - protein, 9 aa, Homo sapiens
YIFTGYYMH

SEQ ID NO: 110373 - protein, 13 aa, Homo sapiens
GMIGPSDGSTSYA

SEQ ID NO: 110374 - protein, 11 aa, Homo sapiens
CAREDDSMDVW

SEQ ID NO: 110375 - protein, 11 aa, Homo sapiens
RASQSISSYLN

SEQ ID NO: 110376 - protein, 7 aa, Homo sapiens
AASSLQS

SEQ ID NO: 110377 - protein, 11 aa, Homo sapiens [sequence omitted]

SEQ ID NO: 110378 - protein, 9 aa, Homo sapiens
YTFIGYYMH

SEQ ID NO: 110379 - protein, 13 aa, Homo sapiens
GMIGPSDGSTSYA

SEQ ID NO: 110380 - protein, 11 aa, Homo sapiens
CARDSSGLDPW

SEQ ID NO: 110381 - protein, 11 aa, Homo sapiens
RASQSISNYLN

SEQ ID NO: 110382 - protein, 7 aa, Homo sapiens
KASSLES

SEQ ID NO: 110383 - protein, 11 aa, Homo sapiens [sequence omitted]

SEQ ID NO: 110384 - protein, 9 aa, Homo sapiens
YTFTGYYMH

SEQ ID NO: 110385 - protein, 13 aa, Homo sapiens
GMIGPSDGSTSYA

SEQ ID NO: 110386 - protein, 11 aa, Homo sapiens [sequence omitted]

SEQ ID NO: 110387 - protein, 11 aa, Homo sapiens
RASQSISNYLN

SEQ ID NO: 110388 - protein, 7 aa, Homo sapiens
AASSLQS

SEQ ID NO: 110389 - protein, 11 aa, Homo sapiens
CHQTYSTPLTF

SEQ ID NO: 110390 - protein, 9 aa, Homo sapiens
VTFSTSAIS

SEQ ID NO: 110391 - protein, 13 aa, Homo sapiens
GWISPYNGNTDYA

SEQ ID NO: 110392 - protein, 27 aa, Homo sapiens
CARDAHQYYDFWSGYYSGTYYYGMDVW

SEQ ID NO: 110393 - protein, 11 aa, Homo sapiens
RASQGISNYLA

SEQ ID NO: 110394 - protein, 7 aa, Homo sapiens
SASNLQS

SEQ ID NO: 110395 - protein, 11 aa, Homo sapiens
CQQAYSFPWTF

SEQ ID NO: 110396 - protein, 9 aa, Homo sapiens
GTFSNSIIN

SEQ ID NO: 110397 - protein, 13 aa, Homo sapiens
GWMNPNSGNTNYA

SEQ ID NO: 110398 - protein, 15 aa, Homo sapiens
CAREQWPSYWYFDLW

SEQ ID NO: 110399 - protein, 11 aa, Homo sapiens
RASQNISSYLN

SEQ ID NO: 110400 - protein, 7 aa, Homo sapiens
AASSLQS

SEQ ID NO: 110401 - protein, 11 aa, Homo sapiens [sequence omitted]

SEQ ID NO: 110402 - protein, 9 aa, Homo sapiens
GTFSTHDIN

SEQ ID NO: 110403 - protein, 13 aa, Homo sapiens
GVINPSGGSAIYA

SEQ ID NO: 110404 - protein, 15 aa, Homo sapiens [sequence omitted]

SEQ ID NO: 110405 - protein, 11 aa, Homo sapiens
RASQDISRYLA

SEQ ID NO: 110406 - protein, 7 aa, Homo sapiens
DASNLET

SEQ ID NO: 110407 - protein, 11 aa, Homo sapiens [sequence omitted]

SEQ ID NO: 110408 - protein, 9 aa, Homo sapiens
NTFIGYYVH

SEQ ID NO: 110409 - protein, 13 aa, Homo sapiens
GIINPNGGSISYA

SEQ ID NO: 110410 - protein, 19 aa, Homo sapiens
CARGSGDPNYYYYYGLDVW

SEQ ID NO: 110411 - protein, 11 aa, Homo sapiens
QASQDISNYLN

SEQ ID NO: 110412 - protein, 7 aa, Homo sapiens
AASNLQS

SEQ ID NO: 110413 - protein, 11 aa, Homo sapiens [sequence omitted]

SEQ ID NO: 110414 - protein, 9 aa, Homo sapiens
YTLSYYYMH

SEQ ID NO: 110415 - protein, 13 aa, Homo sapiens
GMIGPSDGSTSYA

SEQ ID NO: 110416 - protein, 12 aa, Homo sapiens
CARDTGDHFDYW

SEQ ID NO: 110417 - protein, 11 aa, Homo sapiens
RASQSISSYLN

SEQ ID NO: 110418 - protein, 7 aa, Homo sapiens
AASTLQN

SEQ ID NO: 110419 - protein, 11 aa, Homo sapiens [sequence omitted]

SEQ ID NO: 110420 - protein, 9 aa, Homo sapiens
YTFTGYYMH

SEQ ID NO: 110421 - protein, 13 aa, Homo sapiens
GIIGPSDGSTTYA

SEQ ID NO: 110422 - protein, 11 aa, Homo sapiens
CARAENGMDVW

SEQ ID NO: 110423 - protein, 11 aa, Homo sapiens
RASQRISSYLN

SEQ ID NO: 110424 - protein, 7 aa, Homo sapiens
SASTLQS

SEQ ID NO: 110425 - protein, 11 aa, Homo sapiens [sequence omitted]

SEQ ID NO: 110426 - protein, 9 aa, Homo sapiens
YTFTGYYVH

SEQ ID NO: 110427 - protein, 13 aa, Homo sapiens
GIIAPSDGSTNYA

SEQ ID NO: 110428 - protein, 12 aa, Homo sapiens
CARDPGGYMDVW

SEQ ID NO: 110429 - protein, 11 aa, Homo sapiens
RASQSISSYLA

SEQ ID NO: 110430 - protein, 7 aa, Homo sapiens
DASKLET

SEQ ID NO: 110431 - protein, 10 aa, Homo sapiens
CQQSYGVPTF

SEQ ID NO: 110432 - protein, 9 aa, Homo sapiens
YTFTGYYLH

SEQ ID NO: 110433 - protein, 13 aa, Homo sapiens
GMIGPSDGSTSYA

SEQ ID NO: 110434 - protein, 11 aa, Homo sapiens [sequence omitted]

SEQ ID NO: 110435 - protein, 11 aa, Homo sapiens
RASQGISSWLA

SEQ ID NO: 110436 - protein, 7 aa, Homo sapiens
DASNLET

SEQ ID NO: 110437 - protein, 11 aa, Homo sapiens [sequence omitted]

SEQ ID NO: 110438 - protein, 9 aa, Homo sapiens
YTFTGYYMH

SEQ ID NO: 110439 - protein, 13 aa, Homo sapiens
GRISPSDGSTTYA

SEQ ID NO: 110440 - protein, 12 aa, Homo sapiens
CARDMGDAFDIW

SEQ ID NO: 110441 - protein, 11 aa, Homo sapiens
RASQSISSYLN

SEQ ID NO: 110442 - protein, 7 aa, Homo sapiens
AASSLQS

SEQ ID NO: 110443 - protein, 11 aa, Homo sapiens [sequence omitted]

SEQ ID NO: 110444 - protein, 9 aa, Homo sapiens
YTFTGYYMH

SEQ ID NO: 110445 - protein, 13 aa, Homo sapiens
GMIGPSDGSTSYA

SEQ ID NO: 110446 - protein, 11 aa, Homo sapiens
CAREEDGMDVW

SEQ ID NO: 110447 - protein, 11 aa, Homo sapiens
RASQGISTYLA

SEQ ID NO: 110448 - protein, 7 aa, Homo sapiens
DASSLQS

SEQ ID NO: 110449 - protein, 11 aa, Homo sapiens [sequence omitted]

SEQ ID NO: 110450 - protein, 9 aa, Homo sapiens
YTLSYYYMH

SEQ ID NO: 110451 - protein, 13 aa, Homo sapiens
GMIGPSDGSTSYA

SEQ ID NO: 110452 - protein, 12 aa, Homo sapiens
CARDTGDHFDYW

SEQ ID NO: 110453 - protein, 11 aa, Homo sapiens
RASQSISSYLN

SEQ ID NO: 110454 - protein, 7 aa, Homo sapiens
AASTLQN

SEQ ID NO: 110455 - protein, 11 aa, Homo sapiens [sequence omitted]

SEQ ID NO: 110456 - protein, 9 aa, Homo sapiens
GTFNNFAIS

SEQ ID NO: 110457 - protein, 13 aa, Homo sapiens
GGIIPIFDATNYA

SEQ ID NO: 110458 - protein, 19 aa, Homo sapiens
CARGEYSSGFFFVGWFDLW

SEQ ID NO: 110459 - protein, 16 aa, Homo sapiens
RSSQSLLHSNGYNYLD

SEQ ID NO: 110460 - protein, 7 aa, Homo sapiens
LGSNRAS

SEQ ID NO: 110461 - protein, 11 aa, Homo sapiens
CMQTLKTPLSF

SEQ ID NO: 110462 - protein, 9 aa, Homo sapiens
YNFTGYYMH

SEQ ID NO: 110463 - protein, 13 aa, Homo sapiens
GIIAPSDGSTNYA

SEQ ID NO: 110464 - protein, 13 aa, Homo sapiens
CARETGDDAFDIW

SEQ ID NO: 110465 - protein, 11 aa, Homo sapiens
RASQSISSYLN

SEQ ID NO: 110466 - protein, 7 aa, Homo sapiens
AASSLQS

SEQ ID NO: 110467 - protein, 11 aa, Homo sapiens [sequence omitted]

SEQ ID NO: 110468 - protein, 9 aa, Homo sapiens
GTFSSATIS

SEQ ID NO: 110469 - protein, 13 aa, Homo sapiens
GWIYPNSGGTVYA

SEQ ID NO: 110470 - protein, 10 aa, Homo sapiens
CAATEWLGVW

SEQ ID NO: 110471 - protein, 11 aa, Homo sapiens
RASQSISTWLA

SEQ ID NO: 110472 - protein, 7 aa, Homo sapiens
AASSLRS

SEQ ID NO: 110473 - protein, 11 aa, Homo sapiens [sequence omitted]

SEQ ID NO: 110474 - protein, 9 aa, Homo sapiens
GTFSSYAIS

SEQ ID NO: 110475 - protein, 13 aa, Homo sapiens
GWINPNSGGTISA

SEQ ID NO: 110476 - protein, 10 aa, Homo sapiens
CARANWLDYW

SEQ ID NO: 110477 - protein, 11 aa, Homo sapiens
RASQSISRWLA

SEQ ID NO: 110478 - protein, 7 aa, Homo sapiens
AASTVQS

SEQ ID NO: 110479 - protein, 11 aa, Homo sapiens [sequence omitted]

SEQ ID NO: 110480 - protein, 9 aa, Homo sapiens
YTFTTYDLA

SEQ ID NO: 110481 - protein, 13 aa, Homo sapiens
GWINPNSGGTNYA

SEQ ID NO: 110482 - protein, 10 aa, Homo sapiens
CARANWLDYW

SEQ ID NO: 110483 - protein, 11 aa, Homo sapiens
RASQDISRWLA

SEQ ID NO: 110484 - protein, 7 aa, Homo sapiens
AASRLQA

SEQ ID NO: 110485 - protein, 11 aa, Homo sapiens [sequence omitted]

SEQ ID NO: 110486 - protein, 9 aa, Homo sapiens
YSFDSYVVN

SEQ ID NO: 110487 - protein, 13 aa, Homo sapiens
GWINPNSGGTNYA

SEQ ID NO: 110488 - protein, 10 aa, Homo sapiens
CARDWVLDYW

SEQ ID NO: 110489 - protein, 11 aa, Homo sapiens
RASQTISSWLA

SEQ ID NO: 110490 - protein, 7 aa, Homo sapiens
AASSLQS

SEQ ID NO: 110491 - protein, 11 aa, Homo sapiens [sequence omitted]

SEQ ID NO: 110492 - protein, 9 aa, Homo sapiens
YTFTSYGIS

SEQ ID NO: 110493 - protein, 13 aa, Homo sapiens
GWMNPNSGGTNYA

SEQ ID NO: 110494 - protein, 10 aa, Homo sapiens
CARGEWLDYW

SEQ ID NO: 110495 - protein, 11 aa, Homo sapiens
RASQTISSWLA

SEQ ID NO: 110496 - protein, 7 aa, Homo sapiens
AASSLQS

SEQ ID NO: 110497 - protein, 11 aa, Homo sapiens
CQQSYGVPYTF

SEQ ID NO: 110498 - protein, 9 aa, Homo sapiens
YTFTSYGIS

SEQ ID NO: 110499 - protein, 13 aa, Homo sapiens
GWINPNSGGTNYA

SEQ ID NO: 110500 - protein, 10 aa, Homo sapiens
CARGWELGYW

SEQ ID NO: 110501 - protein, 11 aa, Homo sapiens
RASQSISNWLA

SEQ ID NO: 110502 - protein, 7 aa, Homo sapiens
AASSLQS

SEQ ID NO: 110503 - protein, 11 aa, Homo sapiens [sequence omitted]

SEQ ID NO: 110504 - protein, 9 aa, Homo sapiens
YTFTRYTIN

SEQ ID NO: 110505 - protein, 13 aa, Homo sapiens
GWINPNSGGTNYA

SEQ ID NO: 110506 - protein, 11 aa, Homo sapiens
CARDFVGYDDW

SEQ ID NO: 110507 - protein, 11 aa, Homo sapiens
RASQSVGNWLA

SEQ ID NO: 110508 - protein, 7 aa, Homo sapiens
GASSLQT

SEQ ID NO: 110509 - protein, 11 aa, Homo sapiens [sequence omitted]

SEQ ID NO: 110510 - protein, 9 aa, Homo sapiens
YTFTSYGIT

SEQ ID NO: 110511 - protein, 13 aa, Homo sapiens
GWINPNSGGTNYA

SEQ ID NO: 110512 - protein, 11 aa, Homo sapiens
CARDYGDLDYW

SEQ ID NO: 110513 - protein, 11 aa, Homo sapiens
RASQNIGNWLA

SEQ ID NO: 110514 - protein, 7 aa, Homo sapiens
AASTLQT

SEQ ID NO: 110515 - protein, 11 aa, Homo sapiens [sequence omitted]

SEQ ID NO: 110516 - protein, 9 aa, Homo sapiens
GTFSNYILS

SEQ ID NO: 110517 - protein, 13 aa, Homo sapiens
GWINPDSGGTNYA

SEQ ID NO: 110518 - protein, 11 aa, Homo sapiens [sequence omitted]

SEQ ID NO: 110519 - protein, 11 aa, Homo sapiens
RASQSISRWLA

SEQ ID NO: 110520 - protein, 7 aa, Homo sapiens
AASSLQS

SEQ ID NO: 110521 - protein, 11 aa, Homo sapiens [sequence omitted]

SEQ ID NO: 110522 - protein, 9 aa, Homo sapiens
YSFTRYNMH

SEQ ID NO: 110523 - protein, 13 aa, Homo sapiens
GWINPNSGGTNYA

SEQ ID NO: 110524 - protein, 12 aa, Homo sapiens
CARDGYSGLDVW

SEQ ID NO: 110525 - protein, 11 aa, Homo sapiens
RASQSISSWLA

SEQ ID NO: 110526 - protein, 7 aa, Homo sapiens
GASSLQS

SEQ ID NO: 110527 - protein, 11 aa, Homo sapiens [sequence omitted]

SEQ ID NO: 110528 - protein, 9 aa, Homo sapiens
GTFSSYAIS

SEQ ID NO: 110529 - protein, 13 aa, Homo sapiens
GWINPNNGGTNYA

SEQ ID NO: 110530 - protein, 12 aa, Homo sapiens
CARDSGVGMDVW

SEQ ID NO: 110531 - protein, 11 aa, Homo sapiens
RASQSISKWLA

SEQ ID NO: 110532 - protein, 7 aa, Homo sapiens
AASSLQS

SEQ ID NO: 110533 - protein, 11 aa, Homo sapiens [sequence omitted]

SEQ ID NO: 110534 - protein, 9 aa, Homo sapiens
GTFNNYAFS

SEQ ID NO: 110535 - protein, 13 aa, Homo sapiens
GWINPNSGGTNYA

SEQ ID NO: 110536 - protein, 13 aa, Homo sapiens
CARDGVAVASDYW

SEQ ID NO: 110537 - protein, 11 aa, Homo sapiens
RASQGISNYLA

SEQ ID NO: 110538 - protein, 7 aa, Homo sapiens
AASTLQS

SEQ ID NO: 110539 - protein, 11 aa, Homo sapiens [sequence omitted]

SEQ ID NO: 110540 - protein, 9 aa, Homo sapiens
YTFSSYNMH

SEQ ID NO: 110541 - protein, 13 aa, Homo sapiens
GWINGNTGGTNYA

SEQ ID NO: 110542 - protein, 13 aa, Homo sapiens
CARGVNVDDFDYW

SEQ ID NO: 110543 - protein, 11 aa, Homo sapiens
RASQTISNYLN

SEQ ID NO: 110544 - protein, 7 aa, Homo sapiens
AASNLQS

SEQ ID NO: 110545 - protein, 11 aa, Homo sapiens [sequence omitted]

SEQ ID NO: 110546 - protein, 9 aa, Homo sapiens
GTFSSYAFS

SEQ ID NO: 110547 - protein, 13 aa, Homo sapiens
GWINPDTGYTRYA

SEQ ID NO: 110548 - protein, 15 aa, Homo sapiens
CARGDYTGNWYFDLW

SEQ ID NO: 110549 - protein, 11 aa, Homo sapiens
RASRDIGRAVG

SEQ ID NO: 110550 - protein, 7 aa, Homo sapiens
AASSLQS

SEQ ID NO: 110551 - protein, 11 aa, Homo sapiens [sequence omitted]

SEQ ID NO: 110552 - protein, 9 aa, Homo sapiens
YTFTSYGIS

SEQ ID NO: 110553 - protein, 13 aa, Homo sapiens
GWINPYSGGTNYA

SEQ ID NO: 110554 - protein, 10 aa, Homo sapiens
CARANWLDYW

SEQ ID NO: 110555 - protein, 11 aa, Homo sapiens
RASQSISSWLA

SEQ ID NO: 110556 - protein, 7 aa, Homo sapiens
AASTLQS

SEQ ID NO: 110557 - protein, 11 aa, Homo sapiens [sequence omitted]

SEQ ID NO: 110558 - protein, 9 aa, Homo sapiens
YTFTSYGIS

SEQ ID NO: 110559 - protein, 13 aa, Homo sapiens
GWISAYNGYTNYA

SEQ ID NO: 110560 - protein, 17 aa, Homo sapiens
CARDQFYGGNSGGHDYW

SEQ ID NO: 110561 - protein, 11 aa, Homo sapiens
QASQDISNYLN

SEQ ID NO: 110562 - protein, 7 aa, Homo sapiens
AASSLQS

SEQ ID NO: 110563 - protein, 11 aa, Homo sapiens [sequence omitted]

SEQ ID NO: 110564 - protein, 9 aa, Homo sapiens
YTFTDYNMH

SEQ ID NO: 110565 - protein, 13 aa, Homo sapiens
GWMNPNSGGTNYA

SEQ ID NO: 110566 - protein, 8 aa, Homo sapiens
CAREEDYW

SEQ ID NO: 110567 - protein, 11 aa, Homo sapiens
RASQSIGRWLA

SEQ ID NO: 110568 - protein, 7 aa, Homo sapiens
AASSLQS

SEQ ID NO: 110569 - protein, 11 aa, Homo sapiens [sequence omitted]

SEQ ID NO: 110570 - protein, 9 aa, Homo sapiens
YTFTRYTIN

SEQ ID NO: 110571 - protein, 13 aa, Homo sapiens
GWINPNSGGANYA

SEQ ID NO: 110572 - protein, 10 aa, Homo sapiens [sequence omitted]

SEQ ID NO: 110573 - protein, 11 aa, Homo sapiens
RASQSISTWLA

SEQ ID NO: 110574 - protein, 7 aa, Homo sapiens
AASTLQS

SEQ ID NO: 110575 - protein, 11 aa, Homo sapiens [sequence omitted]

SEQ ID NO: 110576 - protein, 9 aa, Homo sapiens
YTFTSYLMH

SEQ ID NO: 110577 - protein, 13 aa, Homo sapiens
GWISPNSGGTNYA

SEQ ID NO: 110578 - protein, 10 aa, Homo sapiens [sequence omitted]

SEQ ID NO: 110579 - protein, 11 aa, Homo sapiens
QASQDISNYLN

SEQ ID NO: 110580 - protein, 7 aa, Homo sapiens
GASRLQS

SEQ ID NO: 110581 - protein, 11 aa, Homo sapiens [sequence omitted]

SEQ ID NO: 110582 - protein, 9 aa, Homo sapiens
YTFSDYYVH

SEQ ID NO: 110583 - protein, 13 aa, Homo sapiens
GWINPNSGGTNYA

SEQ ID NO: 110584 - protein, 10 aa, Homo sapiens [sequence omitted]

SEQ ID NO: 110585 - protein, 11 aa, Homo sapiens
RASQSISSWLA

SEQ ID NO: 110586 - protein, 7 aa, Homo sapiens
AASTLQS

SEQ ID NO: 110587 - protein, 11 aa, Homo sapiens [sequence omitted]

SEQ ID NO: 110588 - protein, 9 aa, Homo sapiens
YTFTTYYMH

SEQ ID NO: 110589 - protein, 13 aa, Homo sapiens
GWINPNSGGTNYA

SEQ ID NO: 110590 - protein, 10 aa, Homo sapiens [sequence omitted]

SEQ ID NO: 110591 - protein, 11 aa, Homo sapiens
RASQSVSNWLA

SEQ ID NO: 110592 - protein, 7 aa, Homo sapiens
AASSLQS

SEQ ID NO: 110593 - protein, 10 aa, Homo sapiens [sequence omitted]

SEQ ID NO: 110594 - protein, 9 aa, Homo sapiens
GTFSNYAIN

SEQ ID NO: 110595 - protein, 13 aa, Homo sapiens
GWISPYSGGTNYA

SEQ ID NO: 110596 - protein, 12 aa, Homo sapiens [sequence omitted]

SEQ ID NO: 110597 - protein, 11 aa, Homo sapiens
QASQDISNYLN

SEQ ID NO: 110598 - protein, 7 aa, Homo sapiens
AASTLQS

SEQ ID NO: 110599 - protein, 11 aa, Homo sapiens
CQQTYAIPLTF

SEQ ID NO: 110600 - protein, 9 aa, Homo sapiens
YTFTDYYMH

SEQ ID NO: 110601 - protein, 13 aa, Homo sapiens
GWIYPNTGGTNYA

SEQ ID NO: 110602 - protein, 12 aa, Homo sapiens
CARDYGGYVDYW

SEQ ID NO: 110603 - protein, 11 aa, Homo sapiens
QASQDIGSWLA

SEQ ID NO: 110604 - protein, 7 aa, Homo sapiens
ATSSLQS

SEQ ID NO: 110605 - protein, 11 aa, Homo sapiens [sequence omitted]

SEQ ID NO: 110606 - protein, 9 aa, Homo sapiens
YTFTSYAMN

SEQ ID NO: 110607 - protein, 13 aa, Homo sapiens
GWMNPNSGGTKYA

SEQ ID NO: 110608 - protein, 12 aa, Homo sapiens
CAREGPAALDVW

SEQ ID NO: 110609 - protein, 11 aa, Homo sapiens
RASQGISRWLA

SEQ ID NO: 110610 - protein, 7 aa, Homo sapiens
AASTLQP

SEQ ID NO: 110611 - protein, 11 aa, Homo sapiens [sequence omitted]

SEQ ID NO: 110612 - protein, 9 aa, Homo sapiens
YTLTSHLIH

SEQ ID NO: 110613 - protein, 13 aa, Homo sapiens
GWINPNSGGTNYA

SEQ ID NO: 110614 - protein, 12 aa, Homo sapiens
CARERRSGMDVW

SEQ ID NO: 110615 - protein, 11 aa, Homo sapiens
RASQGISNYLA

SEQ ID NO: 110616 - protein, 7 aa, Homo sapiens
AASRLES

SEQ ID NO: 110617 - protein, 11 aa, Homo sapiens [sequence omitted]

SEQ ID NO: 110618 - protein, 9 aa, Homo sapiens
YSFTDYIVH

SEQ ID NO: 110619 - protein, 13 aa, Homo sapiens
GWINPYSGGTKYA

SEQ ID NO: 110620 - protein, 12 aa, Homo sapiens
CARVLQEGMDVW

SEQ ID NO: 110621 - protein, 11 aa, Homo sapiens
RASQSISSYLN

SEQ ID NO: 110622 - protein, 7 aa, Homo sapiens
GVSSLQS

SEQ ID NO: 110623 - protein, 10 aa, Homo sapiens [sequence omitted]

SEQ ID NO: 110624 - protein, 9 aa, Homo sapiens
YTFSNFLIN

SEQ ID NO: 110625 - protein, 13 aa, Homo sapiens
GWINPNSGGTNYA

SEQ ID NO: 110626 - protein, 12 aa, Homo sapiens
CASERELPFDIW

SEQ ID NO: 110627 - protein, 11 aa, Homo sapiens
RASQSISSWVA

SEQ ID NO: 110628 - protein, 7 aa, Homo sapiens
GASNLES

SEQ ID NO: 110629 - protein, 11 aa, Homo sapiens [sequence omitted]

SEQ ID NO: 110630 - protein, 9 aa, Homo sapiens
YTFTDYQMF

SEQ ID NO: 110631 - protein, 13 aa, Homo sapiens
GWINPNSGGTNYA

SEQ ID NO: 110632 - protein, 13 aa, Homo sapiens
CAKGGGGYGMDVW

SEQ ID NO: 110633 - protein, 11 aa, Homo sapiens
RASQGISNYLA

SEQ ID NO: 110634 - protein, 7 aa, Homo sapiens
AASSLQS

SEQ ID NO: 110635 - protein, 11 aa, Homo sapiens
CQQSYSDQWTF

SEQ ID NO: 110636 - protein, 9 aa, Homo sapiens
GTFSSYAIS

SEQ ID NO: 110637 - protein, 13 aa, Homo sapiens
GWINPNSGGTNYA

SEQ ID NO: 110638 - protein, 15 aa, Homo sapiens
CAAMGIAVAGGMDVW

SEQ ID NO: 110639 - protein, 11 aa, Homo sapiens
RASQSISRWLA

SEQ ID NO: 110640 - protein, 7 aa, Homo sapiens
AASSLQS

SEQ ID NO: 110641 - protein, 11 aa, Homo sapiens
CQQSYLPPYSF

SEQ ID NO: 110642 - protein, 9 aa, Homo sapiens
YTFTNYHMH

SEQ ID NO: 110643 - protein, 13 aa, Homo sapiens
GWIHPDSGGTSYA

SEQ ID NO: 110644 - protein, 10 aa, Homo sapiens [sequence omitted]

SEQ ID NO: 110645 - protein, 11 aa, Homo sapiens
RASQSISNWLA

SEQ ID NO: 110646 - protein, 7 aa, Homo sapiens
AASSLQS

SEQ ID NO: 110647 - protein, 11 aa, Homo sapiens [sequence omitted]

SEQ ID NO: 110648 - protein, 9 aa, Homo sapiens
YTFTGYYMH

SEQ ID NO: 110649 - protein, 13 aa, Homo sapiens
GWMNPNSGNTGYA

SEQ ID NO: 110650 - protein, 11 aa, Homo sapiens
CATYDDGMDVW

SEQ ID NO: 110651 - protein, 11 aa, Homo sapiens
RASQSISHYLN

SEQ ID NO: 110652 - protein, 7 aa, Homo sapiens
GASSLQS

SEQ ID NO: 110653 - protein, 11 aa, Homo sapiens [sequence omitted]

SEQ ID NO: 110654 - protein, 9 aa, Homo sapiens
YTFTSYTVN

SEQ ID NO: 110655 - protein, 13 aa, Homo sapiens
GWINPNSGGTKYA

SEQ ID NO: 110656 - protein, 12 aa, Homo sapiens
CARGGGGALDYW

SEQ ID NO: 110657 - protein, 11 aa, Homo sapiens
RASQSISSWLA

SEQ ID NO: 110658 - protein, 7 aa, Homo sapiens
AASTLQS

SEQ ID NO: 110659 - protein, 11 aa, Homo sapiens
CQQSYLPPYSF

SEQ ID NO: 110660 - protein, 9 aa, Homo sapiens
YTFTSYYMH

SEQ ID NO: 110661 - protein, 13 aa, Homo sapiens
GMINPRDDTTDYA

SEQ ID NO: 110662 - protein, 13 aa, Homo sapiens
CALSGNYYGMDVW

SEQ ID NO: 110663 - protein, 11 aa, Homo sapiens
QASQDISNYLN

SEQ ID NO: 110664 - protein, 7 aa, Homo sapiens
GASRLQS

SEQ ID NO: 110665 - protein, 9 aa, Homo sapiens
CQEGITYTF

SEQ ID NO: 110666 - protein, 9 aa, Homo sapiens
YTFTNYYMH

SEQ ID NO: 110667 - protein, 13 aa, Homo sapiens
GMINPSGGGTSYA

SEQ ID NO: 110668 - protein, 14 aa, Homo sapiens
CARGNPWELRLDYW

SEQ ID NO: 110669 - protein, 11 aa, Homo sapiens
QASQDISNYLN

SEQ ID NO: 110670 - protein, 7 aa, Homo sapiens
AASSLQS

SEQ ID NO: 110671 - protein, 11 aa, Homo sapiens [sequence omitted]

SEQ ID NO: 110672 - protein, 9 aa, Homo sapiens
YTFTSQYMH

SEQ ID NO: 110673 - protein, 13 aa, Homo sapiens
GRIIPLLGIVNYA

SEQ ID NO: 110674 - protein, 13 aa, Homo sapiens
CARDKNYYGMDVW

SEQ ID NO: 110675 - protein, 11 aa, Homo sapiens
RASQSVSRNLA

SEQ ID NO: 110676 - protein, 7 aa, Homo sapiens
GASTRAT

SEQ ID NO: 110677 - protein, 11 aa, Homo sapiens
CQHYGYSPVTF

SEQ ID NO: 110678 - protein, 9 aa, Homo sapiens
GTFSNYGIS

SEQ ID NO: 110679 - protein, 12 aa, Homo sapiens
GIINPGGSTSYA

SEQ ID NO: 110680 - protein, 18 aa, Homo sapiens
CARDGYDFWSGYTSDDYW

SEQ ID NO: 110681 - protein, 12 aa, Homo sapiens
RASQSVSSSNLA

SEQ ID NO: 110682 - protein, 7 aa, Homo sapiens
GASTRAT

SEQ ID NO: 110683 - protein, 10 aa, Homo sapiens
CHHYGRSHTF

SEQ ID NO: 110684 - protein, 9 aa, Homo sapiens
FTFSSYAMH

SEQ ID NO: 110685 - protein, 13 aa, Homo sapiens
SGISGSGGSTYYA

SEQ ID NO: 110686 - protein, 9 aa, Homo sapiens
CASDYGDYR

SEQ ID NO: 110687 - protein, 11 aa, Homo sapiens
RASQDIRNDLG

SEQ ID NO: 110688 - protein, 7 aa, Homo sapiens
AASSLQS

SEQ ID NO: 110689 - protein, 11 aa, Homo sapiens
CQQANAFPPTF

SEQ ID NO: 110690 - protein, 9 aa, Homo sapiens
YTFSNYYIH

SEQ ID NO: 110691 - protein, 13 aa, Homo sapiens
GWLNPNSGNTGYA

SEQ ID NO: 110692 - protein, 20 aa, Homo sapiens
CARDLMTTVVTPGDYGMDVW

SEQ ID NO: 110693 - protein, 17 aa, Homo sapiens
KSSQSVFYSSNNKNQLA

SEQ ID NO: 110694 - protein, 7 aa, Homo sapiens
WASTRES

SEQ ID NO: 110695 - protein, 11 aa, Homo sapiens [sequence omitted]

SEQ ID NO: 110696 - protein, 9 aa, Homo sapiens
YTFTTDGIS

SEQ ID NO: 110697 - protein, 13 aa, Homo sapiens
GRIYPHSGYTEYA

SEQ ID NO: 110698 - protein, 14 aa, Homo sapiens
CARQDGGAFAFDIW

SEQ ID NO: 110699 - protein, 11 aa, Homo sapiens
QASQDIFKYLN

SEQ ID NO: 110700 - protein, 7 aa, Homo sapiens
AASTLQS

SEQ ID NO: 110701 - protein, 11 aa, Homo sapiens
CQQSYSTPPTF

SEQ ID NO: 110702 - protein, 9 aa, Homo sapiens
YTFTSQYMH

SEQ ID NO: 110703 - protein, 13 aa, Homo sapiens
GWISPNNGDTNYA

SEQ ID NO: 110704 - protein, 14 aa, Homo sapiens [sequence omitted]

SEQ ID NO: 110705 - protein, 11 aa, Homo sapiens
RASQSISTWLA

SEQ ID NO: 110706 - protein, 7 aa, Homo sapiens
YASSLQS

SEQ ID NO: 110707 - protein, 11 aa, Homo sapiens [sequence omitted]

SEQ ID NO: 110708 - protein, 9 aa, Homo sapiens
YTFTSYDIN

SEQ ID NO: 110709 - protein, 13 aa, Homo sapiens
GRIIPMLNIANYA

SEQ ID NO: 110710 - protein, 19 aa, Homo sapiens
CARALIFGVPLLPYGMDVW

SEQ ID NO: 110711 - protein, 16 aa, Homo sapiens
SSSQSLLHSNGYNYLD

SEQ ID NO: 110712 - protein, 7 aa, Homo sapiens
LGSNRAS

SEQ ID NO: 110713 - protein, 11 aa, Homo sapiens [sequence omitted]

SEQ ID NO: 110714 - protein, 9 aa, Homo sapiens
FTFSSSWMH

SEQ ID NO: 110715 - protein, 13 aa, Homo sapiens
SFISTSSGYIYYA

SEQ ID NO: 110716 - protein, 20 aa, Homo sapiens
CAKDLATVGEPYYYYGMDVW

SEQ ID NO: 110717 - protein, 11 aa, Homo sapiens
QASQDISNYLN

SEQ ID NO: 110718 - protein, 7 aa, Homo sapiens
SASNLRS

SEQ ID NO: 110719 - protein, 11 aa, Homo sapiens [sequence omitted]

SEQ ID NO: 110720 - protein, 9 aa, Homo sapiens
DTFNTYALS

SEQ ID NO: 110721 - protein, 13 aa, Homo sapiens
GWMNPNSGNAGYA

SEQ ID NO: 110722 - protein, 20 aa, Homo sapiens
CARLWFGELHYYYYYGMDVW

SEQ ID NO: 110723 - protein, 16 aa, Homo sapiens
RSSQSLLHSNGYNYLD

SEQ ID NO: 110724 - protein, 7 aa, Homo sapiens
LGSNRAS

SEQ ID NO: 110725 - protein, 11 aa, Homo sapiens
CMQGSHWPPSF

SEQ ID NO: 110726 - DNA, 1660 bp, Homo sapiens
atgggatggagctgtatcatcctcttcttggtagcaacagctacaggtaaggggctcacagtagcaggcttgaggtctggacatatatatgggtgacaatgacatccactttgcctttctctccacaggtgtacactccgacatccagatgacccagagcccaagcagcctgagcgccagcgtgggcgacagggtgaccatcacctgccaggccagccaggacatctcaaactacctgaactggtatcaacagaagcccggcaaggcccccaagttgcttatctacgccgcgagcagcttgcaaagcggcgtgcccagcaggttcagcggtagtggcagtggcaccgactttaccctgaccataagcagtctgcagcccgaggacttcgccacctactactgccagcagtactacagctaccccttcaccttcggacccggaaccaaggtggacatcaaaggaggcggaggatctggtggtggtggatctggcggcggaggaagtggtggcggaggctctcaggtgcagctggtgcagagcggagccgaggtgaagaaacctggggcaagcgtgaaagtgagctgcaaggccagcggctacaccttcaccaactactacatgcactgggtgaggcaggcacctggtcaaggcctggagtggatgggcatgatcaaccccagcggaggagggaccagctacgcccagaagttccaaggccgcgtgaccatgactagggatacctccaccagcaccgtgtatatggagctgagcagcctgaggagcgaggacaccgccgtgtattactgcgccaggggcaatccctgggaactgagactggactactgggggcagggcaccctcgtgacagtgtcttctggcggagggggatcccaggtccagctgcagcagtctggggctgaactggcaagacctggggcctcagtgaagatgtcctgcaaggcttctggctacacctttactaggtacacgatgcactgggtaaaacagaggcctggacagggtctggaatggattggatacattaatcctagccgtggttatactaattacaatcagaagttcaaggacaaggccacattgactacagacaaatcctccagcacagcctacatgcaactgagcagcctgacatctgaggactctgcagtctattactgtgcaagatattatgatgatcattacagccttgactactggggccaaggcaccactctcacagtctcctcagtggagggcggctccggcggctccggtggctctggcggaagcggcggcgtggaccaaattgttctcacccagtctccagcaatcatgtctgcatctccaggggagaaggtcaccatgacctgcagtgccagctcaagtgtaagttacatgaactggtaccagcagaagtcaggcacctcccccaaaagatggatttatgacacatccaaactggcttctggagtccctgctcacttcaggggcagtgggtctgggacctcttactctctcacaatcagcggcatggaggctgaagatgctgccacttattactgccagcagtggagtagtaacccattcacgttcggctcggggacaaagttggaaataaacggcggagggggctctcatcatcaccatcaccatcatcac

SEQ ID NO: 110727 - protein, 526 aa, Homo sapiens; identical to SEQ ID NO: 109462

SEQ ID NO: 110728 - DNA, 1666 bp, Homo sapiens
atgggatggagctgtatcatcctcttcttggtagcaacagctacaggtaaggggctcacagtagcaggcttgaggtctggacatatatatgggtgacaatgacatccactttgcctttctctccacaggtgtacactccgacatccagatgacccagagcccctccagtcttagcgccagcgtgggcgacagggtgaccatcacctgccaggccagccaggacatcagcaactacctgaattggtatcagcagaagcccggcaaggcccccaagctcctgatctacgccgcgagctcactgcagagcggcgtgcccagcaggttcagtggcagcggaagcgggaccgacttcacgctgaccattagcagcctccagcctgaggacttcgccacctactactgccagcaagccatcagcttccccctgactttcggccagagcaccaaggtggagatcaagggaggcggaggatctggtggtggtggatctggcggcggaggaagtggtggcggaggctctgaggtgcagcttcttgagtctggcggtggtctggtgaagcccggtggcagcctgcgcctcagctgtgccgcaagcggcttcagtttcagcagctactggatgagctgggtgaggcaggcacccggcaagggccttgagtggatcagctacatcagcggcgactctggctacaccaactacgccgacagcgttaagggcaggttcaccatcagcagggacgatagcaagaacaccctgtacctgcagatgaatagcctgaagaccgaagacaccgccgtgtactactgcgccagccacgattacggagactatggagagtacttccagcactggggccagggcaccctggtgacggtgagctctggcggagggggatcccaggtccagctgcagcagtctggggctgaactggcaagacctggggcctcagtgaagatgtcctgcaaggcttctggctacacctttactaggtacacgatgcactgggtaaaacagaggcctggacagggtctggaatggattggatacattaatcctagccgtggttatactaattacaatcagaagttcaaggacaaggccacattgactacagacaaatcctccagcacagcctacatgcaactgagcagcctgacatctgaggactctgcagtctattactgtgcaagatattatgatgatcattacagccttgactactggggccaaggcaccactctcacagtctcctcagtggagggcggctccggcggctccggtggctctggcggaagcggcggcgtggaccaaattgttctcacccagtctccagcaatcatgtctgcatctccaggggagaaggtcaccatgacctgcagtgccagctcaagtgtaagttacatgaactggtaccagcagaagtcaggcacctcccccaaaagatggatttatgacacatccaaactggcttctggagtccctgctcacttcaggggcagtgggtctgggacctcttactctctcacaatcagcggcatggaggctgaagatgctgccacttattactgccagcagtggagtagtaacccattcacgttcggctcggggacaaagttggaaataaacggcggagggggctctcatcatcaccatcaccatcatcac

SEQ ID NO: 110729 - protein, 528 aa, Homo sapiens; identical to SEQ ID NO: 109463

SEQ ID NO: 110730 - DNA, 1588 bp, Homo sapiens
atgggatggagctgtatcatcctcttcttggtagcaacagctacaggtaaggggctcacagtagcaggcttgaggtctggacatatatatgggtgacaatgacatccactttgcctttctctccacaggtgtacactcccaggtgcagctggtgcagagcggagccgaggtgaagaaacctggggcaagcgtgaaagtgagctgcaaggccagcggctacaccttcaccaactactacatgcactgggtgaggcaggcacctggtcaaggcctggagtggatgggcatgatcaaccccagcggaggagggaccagctacgcccagaagttccaaggccgcgtgaccatgactagggatacctccaccagcaccgtgtatatggagctgagcagcctgaggagcgaggacaccgccgtgtattactgcgccaggggcaatccctgggaactgagactggactactgggggcagggcaccctcgtgacagtgtcttctggaggcggaggatctggtggtggtggatctggcggcggaggaagtggtggcggaggctctgacatccagatgacccagagcccaagcagcctgagcgccagcgtgggcgacagggtgaccatcacctgccaggccagccaggacatctcaaactacctgaactggtatcaacagaagcccggcaaggcccccaagttgcttatctacgccgcgagcagcttgcaaagcggcgtgcccagcaggttcagcggtagtggcagtggcaccgactttaccctgaccataagcagtctgcagcccgaggacttcgccacctactactgccagcagtactacagctaccccttcaccttcggacccggaaccaaggtggacatcaaaggcggagggggatccgagcccaagagcagcgacaaaacccatacatgccccccttgtcccgctcccgaactgctgggcggacctagcgtctttttattcccccccaagcccaaggacactttaatgatctctcgtacccccgaagtgacttgtgtcgtcgtggacgtgagccacgaggaccccgaggtcaagttcaactggtacgttgatggcgtggaagtgcacaacgccaagaccaaacctcgtgaagagcagtaccagtccacatatcgggtggtgtccgtgctgaccgtgctgcaccaagattggctgaacggcaaggagtacaagtgtaaagtgtccaacaaggccctccccgcccccatcgagaagaccatcagcaaagccaagggccagcctagggagcctcaagtttataccctccctccttgccgtgaagagatgaccaagaatcaagtttctttatggtgcctcgtcaagggcttttaccctagcgacattgctgtggagtgggagtccaacggccagcccgagaacaactacaagaccaccccccccgtcctcgatagcgacggttctttctttttatattctaagctgaccgttgataagtcccggtggcagcaaggcaacgtgtttagctgctccgtgatgcacgaggctttacataatcactacacccagaagtccctctctttatcccccggtaag

SEQ ID NO: 110731 - protein, 502 aa, Homo sapiens; identical to SEQ ID NO: 109470

SEQ ID NO: 110732 - DNA, 1591 bp, Homo sapiens
atgggatggagctgtatcatcctcttcttggtagcaacagctacaggtaaggggctcacagtagcaggcttgaggtctggacatatatatgggtgacaatgacatccactttgcctttctctccacaggtgtacactccgaggtgcagcttcttgagtctggcggtggtctggtgaagcccggtggcagcctgcgcctcagctgtgccgcaagcggcttcagtttcagcagctactggatgagctgggtgaggcaggcacccggcaagggccttgagtggatcagctacatcagcggcgactctggctacaccaactacgccgacagcgttaagggcaggttcaccatcagcagggacgatagcaagaacaccctgtacctgcagatgaatagcctgaagaccgaagacaccgccgtgtactactgcgccagccacgattacggagactatggagagtacttccagcactggggccagggcaccctggtgacggtgagctctggaggcggaggatctggtggtggtggatctggcggcggaggaagtggtggcggaggctctgacatccagatgacccagagcccctccagtcttagcgccagcgtgggcgacagggtgaccatcacctgccaggccagccaggacatcagcaactacctgaattggtatcagcagaagcccggcaaggcccccaagctcctgatctacgccgcgagctcactgcagagcggcgtgcccagcaggttcagtggcagcggaagcgggaccgacttcacgctgaccattagcagcctccagcctgaggacttcgccacctactactgccagcaagccatcagcttccccctgactttcggccagagcaccaaggtggagatcaagggagggggatccgagcccaagagcagcgacaaaacccatacatgccccccttgtcccgctcccgaactgctgggcggacctagcgtctttttattcccccccaagcccaaggacactttaatgatctctcgtacccccgaagtgacttgtgtcgtcgtggacgtgagccacgaggaccccgaggtcaagttcaactggtacgttgatggcgtggaagtgcacaacgccaagaccaaacctcgtgaagagcagtaccagtccacatatcgggtggtgtccgtgctgaccgtgctgcaccaagattggctgaacggcaaggagtacaagtgtaaagtgtccaacaaggccctccccgcccccatcgagaagaccatcagcaaagccaagggccagcctagggagcctcaagtttataccctccctccttgccgtgaagagatgaccaagaatcaagtttctttatggtgcctcgtcaagggcttttaccctagcgacattgctgtggagtgggagtccaacggccagcccgagaacaactacaagaccaccccccccgtcctcgatagcgacggttctttctttttatattctaagctgaccgttgataagtcccggtggcagcaaggcaacgtgtttagctgctccgtgatgcacgaggctttacataatcactacacccagaagtccctctctttatcccccggtaag

SEQ ID NO: 110733 - protein, 503 aa, Homo sapiens; identical to SEQ ID NO: 109473

SEQ ID NO: 110734 - DNA, 1486 bp, Homo sapiens
atgggatggagctgtatcatcctcttcttggtagcaacagctacaggtaaggggctcacagtagcaggcttgaggtctggacatatatatgggtgacaatgacatccactttgcctttctctccacaggtgtacactcccaggtccagctgcagcagtctggggctgaactggcaagacctggggcctcagtgaagatgtcctgcaaggcttctggctacacctttactaggtacacgatgcactgggtaaaacagaggcctggacagggtctggaatggattggatacattaatcctagccgtggttatactaattacaatcagaagttcaaggacaaggccacattgactacagacaaatcctccagcacagcctacatgcaactgagcagcctgacatctgaggactctgcagtctattactgtgcaagatattatgatgatcattacagccttgactactggggccaaggcaccactctcacagtctcgagcgccagcaccaagggaccctccgtgttccctctggccccctccagcaagtccacatccggaggcaccgccgctctgggatgtctggtgaaggactacttccccgagcccgtgacagtgtcttggaactctggcgctttaaccagcggcgtccatacattccccgctgttttacagagctccggcctctactctttatccagcgtggtgaccgtccctagctccagcctcggaacccagacatacatctgcaatgtcaaccacaagccctccaacaccaaggtggataagagagtggagcccaagagctgcgacaaaacccatacatgccccccttgtcccgctcccgaactgctgggcggacctagcgtctttttattcccccccaagcccaaggacactttaatgatctctcgtacccccgaagtgacttgtgtcgtcgtggacgtgagccacgaggaccccgaggtcaagttcaactggtacgttgatggcgtggaagtgcacaacgccaagaccaaacctcgtgaagagcagtaccagtccacatatcgggtggtgtccgtgctgaccgtgctgcaccaagattggctgaacggcaaggagtacaagtgtaaagtgtccaacaaggccctccccgcccccatcgagaagaccatcagcaaagccaagggccagcctagggagcctcaagtttgcaccctccctccttctcgtgaagagatgaccaagaatcaagtttctttatcctgcgcggtcaagggcttttaccctagcgacattgctgtggagtgggagtccaacggccagcccgagaacaactacaagaccaccccccccgtcctcgatagcgacggttctttctttttagtctctaagctgaccgttgataagtcccggtggcagcaaggcaacgtgtttagctgctccgtgatgcacgaggctttacataatcgtttcacccagaagtccctctctttatcccccggtaag

SEQ ID NO: 110735 - protein, 468 aa, Homo sapiens; identical to SEQ ID NO: 109497

SEQ ID NO: 110736 - DNA, 2254 bp, Homo sapiens
atgggatggagctgtatcatcctcttcttggtagcaacagctacaggtaaggggctcacagtagcaggcttgaggtctggacatatatatgggtgacaatgacatccactttgcctttctctccacaggtgtacactcccaggtgcagctggtgcagagcggagccgaggtgaagaaacctggggcaagcgtgaaagtgagctgcaaggccagcggctacaccttcaccaactactacatgcactgggtgaggcaggcacctggtcaaggcctggagtggatgggcatgatcaaccccagcggaggagggaccagctacgcccagaagttccaaggccgcgtgaccatgactagggatacctccaccagcaccgtgtatatggagctgagcagcctgaggagcgaggacaccgccgtgtattactgcgccaggggcaatccctgggaactgagactggactactgggggcagggcaccctcgtgacagtgtcttctggaggcggaggatctggtggtggtggatctggcggcggaggaagtggtggcggaggctctgacatccagatgacccagagcccaagcagcctgagcgccagcgtgggcgacagggtgaccatcacctgccaggccagccaggacatctcaaactacctgaactggtatcaacagaagcccggcaaggcccccaagttgcttatctacgccgcgagcagcttgcaaagcggcgtgcccagcaggttcagcggtagtggcagtggcaccgactttaccctgaccataagcagtctgcagcccgaggacttcgccacctactactgccagcagtactacagctaccccttcaccttcggacccggaaccaaggtggacatcaaaggcggagggggatccggcggagggggctctcaggtccagctgcagcagtctggggctgaactggcaagacctggggcctcagtgaagatgtcctgcaaggcttctggctacacctttactaggtacacgatgcactgggtaaaacagaggcctggacagggtctggaatggattggatacattaatcctagccgtggttatactaattacaatcagaagttcaaggacaaggccacattgactacagacaaatcctccagcacagcctacatgcaactgagcagcctgacatctgaggactctgcagtctattactgtgcaagatattatgatgatcattacagccttgactactggggccaaggcaccactctcacagtctcgagcgccagcaccaagggaccctccgtgttccctctggccccctccagcaagtccacatccggaggcaccgccgctctgggatgtctggtgaaggactacttccccgagcccgtgacagtgtcttggaactctggcgctttaaccagcggcgtccatacattccccgctgttttacagagctccggcctctactctttatccagcgtggtgaccgtccctagctccagcctcggaacccagacatacatctgcaatgtcaaccacaagccctccaacaccaaggtggataagagagtggagcccaagagctgcgacaaaacccatacatgccccccttgtcccgctcccgaactgctgggcggacctagcgtctttttattcccccccaagcccaaggacactttaatgatctctcgtacccccgaagtgacttgtgtcgtcgtggacgtgagccacgaggaccccgaggtcaagttcaactggtacgttgatggcgtggaagtgcacaacgccaagaccaaacctcgtgaagagcagtaccagtccacatatcgggtggtgtccgtgctgaccgtgctgcaccaagattggctgaacggcaaggagtacaagtgtaaagtgtccaacaaggccctccccgcccccatcgagaagaccatcagcaaagccaagggccagcctagggagcctcaagtttgcaccctccctccttctcgtgaagagatgaccaagaatcaagtttctttatcctgcgcggtcaagggcttttaccctagcgacattgctgtggagtgggagtccaacggccagcccgagaacaactacaagaccaccccccccgtcctcgatagcgacggttctttctttttagtctctaagctgaccgttgataagtcccggtggcagcaaggcaacgtgtttagctgctccgtgatgcacgaggctttacataatcgtttcacccagaagtccctctctttatcccccggtaag

SEQ ID NO: 110737 - protein, 724 aa, Homo sapiens; identical to SEQ ID NO: 109471

SEQ ID NO: 110738 - DNA, 2257 bp, Homo sapiens
atgggatggagctgtatcatcctcttcttggtagcaacagctacaggtaaggggctcacagtagcaggcttgaggtctggacatatatatgggtgacaatgacatccactttgcctttctctccacaggtgtacactccgaggtgcagcttcttgagtctggcggtggtctggtgaagcccggtggcagcctgcgcctcagctgtgccgcaagcggcttcagtttcagcagctactggatgagctgggtgaggcaggcacccggcaagggccttgagtggatcagctacatcagcggcgactctggctacaccaactacgccgacagcgttaagggcaggttcaccatcagcagggacgatagcaagaacaccctgtacctgcagatgaatagcctgaagaccgaagacaccgccgtgtactactgcgccagccacgattacggagactatggagagtacttccagcactggggccagggcaccctggtgacggtgagctctggaggcggaggatctggtggtggtggatctggcggcggaggaagtggtggcggaggctctgacatccagatgacccagagcccctccagtcttagcgccagcgtgggcgacagggtgaccatcacctgccaggccagccaggacatcagcaactacctgaattggtatcagcagaagcccggcaaggcccccaagctcctgatctacgccgcgagctcactgcagagcggcgtgcccagcaggttcagtggcagcggaagcgggaccgacttcacgctgaccattagcagcctccagcctgaggacttcgccacctactactgccagcaagccatcagcttccccctgactttcggccagagcaccaaggtggagatcaagggagggggatccggcggagggggctctcaggtccagctgcagcagtctggggctgaactggcaagacctggggcctcagtgaagatgtcctgcaaggcttctggctacacctttactaggtacacgatgcactgggtaaaacagaggcctggacagggtctggaatggattggatacattaatcctagccgtggttatactaattacaatcagaagttcaaggacaaggccacattgactacagacaaatcctccagcacagcctacatgcaactgagcagcctgacatctgaggactctgcagtctattactgtgcaagatattatgatgatcattacagccttgactactggggccaaggcaccactctcacagtctcgagcgccagcaccaagggaccctccgtgttccctctggccccctccagcaagtccacatccggaggcaccgccgctctgggatgtctggtgaaggactacttccccgagcccgtgacagtgtcttggaactctggcgctttaaccagcggcgtccatacattccccgctgttttacagagctccggcctctactctttatccagcgtggtgaccgtccctagctccagcctcggaacccagacatacatctgcaatgtcaaccacaagccctccaacaccaaggtggataagagagtggagcccaagagctgcgacaaaacccatacatgccccccttgtcccgctcccgaactgctgggcggacctagcgtctttttattcccccccaagcccaaggacactttaatgatctctcgtacccccgaagtgacttgtgtcgtcgtggacgtgagccacgaggaccccgaggtcaagttcaactggtacgttgatggcgtggaagtgcacaacgccaagaccaaacctcgtgaagagcagtaccagtccacatatcgggtggtgtccgtgctgaccgtgctgcaccaagattggctgaacggcaaggagtacaagtgtaaagtgtccaacaaggccctccccgcccccatcgagaagaccatcagcaaagccaagggccagcctagggagcctcaagtttgcaccctccctccttctcgtgaagagatgaccaagaatcaagtttctttatcctgcgcggtcaagggcttttaccctagcgacattgctgtggagtgggagtccaacggccagcccgagaacaactacaagaccaccccccccgtcctcgatagcgacggttctttctttttagtctctaagctgaccgttgataagtcccggtggcagcaaggcaacgtgtttagctgctccgtgatgcacgaggctttacataatcgtttcacccagaagtccctctctttatcccccggtaag

SEQ ID NO: 110739 - protein, 725 aa, Homo sapiens; identical to SEQ ID NO: 109474

SEQ ID NO: 110740 - DNA, 841 bp, Homo sapiens
atgggatggagctgtatcatcctcttcttggtagcaacagctacaggtaaggggctcacagtagcaggcttgaggtctggacatatatatgggtgacaatgacatccactttgcctttctctccacaggtgtacactccggatccgagcccaagagcagcgacaaaacccatacatgccccccttgtcccgctcccgaactgctgggcggacctagcgtctttttattcccccccaagcccaaggacactttaatgatctctcgtacccccgaagtgacttgtgtcgtcgtggacgtgagccacgaggaccccgaggtcaagttcaactggtacgttgatggcgtggaagtgcacaacgccaagaccaaacctcgtgaagagcagtaccagtccacatatcgggtggtgtccgtgctgaccgtgctgcaccaagattggctgaacggcaaggagtacaagtgtaaagtgtccaacaaggccctccccgcccccatcgagaagaccatcagcaaagccaagggccagcctagggagcctcaagtttataccctccctccttgccgtgaagagatgaccaagaatcaagtttctttatggtgcctcgtcaagggcttttaccctagcgacattgctgtggagtgggagtccaacggccagcccgagaacaactacaagaccaccccccccgtcctcgatagcgacggttctttctttttatattctaagctgaccgttgataagtcccggtggcagcaaggcaacgtgtttagctgctccgtgatgcacgaggctttacataatcactacacccagaagtccctctctttatcccccggtaag

SEQ ID NO: 110741 - protein, 253 aa, Homo sapiens; identical to SEQ ID NO: 109541

SEQ ID NO: 110742 - DNA, 2254 bp, Homo sapiens
atgggatggagctgtatcatcctcttcttggtagcaacagctacaggtaaggggctcacagtagcaggcttgaggtctggacatatatatgggtgacaatgacatccactttgcctttctctccacaggtgtacactcccaggtgcagctggtgcagagcggagccgaggtgaagaaacctggggcaagcgtgaaagtgagctgcaaggccagcggctacaccttcaccaactactacatgcactgggtgaggcaggcacctggtcaaggcctggagtggatgggcatgatcaaccccagcggaggagggaccagctacgcccagaagttccaaggccgcgtgaccatgactagggatacctccaccagcaccgtgtatatggagctgagcagcctgaggagcgaggacaccgccgtgtattactgcgccaggggcaatccctgggaactgagactggactactgggggcagggcaccctcgtgacagtgtcttctggaggcggaggatctggtggtggtggatctggcggcggaggaagtggtggcggaggctctgacatccagatgacccagagcccaagcagcctgagcgccagcgtgggcgacagggtgaccatcacctgccaggccagccaggacatctcaaactacctgaactggtatcaacagaagcccggcaaggcccccaagttgcttatctacgccgcgagcagcttgcaaagcggcgtgcccagcaggttcagcggtagtggcagtggcaccgactttaccctgaccataagcagtctgcagcccgaggacttcgccacctactactgccagcagtactacagctaccccttcaccttcggacccggaaccaaggtggacatcaaaggcggagggggatccggcggagggggctctcaggtccagctgcagcagtctggggctgaactggcaagacctggggcctcagtgaagatgtcctgcaaggcttctggctacacctttactaggtacacgatgcactgggtaaaacagaggcctggacagggtctggaatggattggatacattaatcctagccgtggttatactaattacaatcagaagttcaaggacaaggccacattgactacagacaaatcctccagcacagcctacatgcaactgagcagcctgacatctgaggactctgcagtctattactgtgcaagatattatgatgatcattacagccttgactactggggccaaggcaccactctcacagtctcgagcgccagcaccaagggaccctccgtgttccctctggccccctccagcaagtccacatccggaggcaccgccgctctgggatgtctggtgaaggactacttccccgagcccgtgacagtgtcttggaactctggcgctttaaccagcggcgtccatacattccccgctgttttacagagctccggcctctactctttatccagcgtggtgaccgtccctagctccagcctcggaacccagacatacatctgcaatgtcaaccacaagccctccaacaccaaggtggataagagagtggagcccaagagctgcgacaaaacccatacatgccccccttgtcccgctcccgaactgctgggcggacctagcgtctttttattcccccccaagcccaaggacactttaatgatctctcgtacccccgaagtgacttgtgtcgtcgtggacgtgagccacgaggaccccgaggtcaagttcaactggtacgttgatggcgtggaagtgcacaacgccaagaccaaacctcgtgaagagcagtaccagtccacatatcgggtggtgtccgtgctgaccgtgctgcaccaagattggctgaacggcaaggagtacaagtgtaaagtgtccaacaaggccctccccgcccccatcgagaagaccatcagcaaagccaagggccagcctagggagcctcaagtttataccctccctccttctcgtgaagagatgaccaagaatcaagtttctttaacatgcctcgtcaagggcttttaccctagcgacattgctgtggagtgggagtccaacggccagcccgagaacaactacaagaccaccccccccgtcctcgatagcgacggttctttctttttatattctaagctgaccgttgataagtcccggtggcagcaaggcaacgtgtttagctgctccgtgatgcacgaggctttacataatcactacacccagaagtccctctctttatcccccggtaag

SEQ ID NO: 110743 - protein, 724 aa, Homo sapiens; identical to SEQ ID NO: 109567

SEQ ID NO: 110744 - DNA, 2254 bp, Homo sapiens
atgggatggagctgtatcatcctcttcttggtagcaacagctacaggtaaggggctcacagtagcaggcttgaggtctggacatatatatgggtgacaatgacatccactttgcctttctctccacaggtgtacactcccaggtccagctgcagcagtctggggctgaactggcaagacctggggcctcagtgaagatgtcctgcaaggcttctggctacacctttactaggtacacgatgcactgggtaaaacagaggcctggacagggtctggaatggattggatacattaatcctagccgtggttatactaattacaatcagaagttcaaggacaaggccacattgactacagacaaatcctccagcacagcctacatgcaactgagcagcctgacatctgaggactctgcagtctattactgtgcaagatattatgatgatcattacagccttgactactggggccaaggcaccactctcacagtctcgagcgccagcaccaagggaccctccgtgttccctctggccccctccagcaagtccacatccggaggcaccgccgctctgggatgtctggtgaaggactacttccccgagcccgtgacagtgtcttggaactctggcgctttaaccagcggcgtccatacattccccgctgttttacagagctccggcctctactctttatccagcgtggtgaccgtccctagctccagcctcggaacccagacatacatctgcaatgtcaaccacaagccctccaacaccaaggtggataagagagtggagcccaagagctgcgacaaaacccatacatgccccccttgtcccgctcccgaactgctgggcggacctagcgtctttttattcccccccaagcccaaggacactttaatgatctctcgtacccccgaagtgacttgtgtcgtcgtggacgtgagccacgaggaccccgaggtcaagttcaactggtacgttgatggcgtggaagtgcacaacgccaagaccaaacctcgtgaagagcagtaccagtccacatatcgggtggtgtccgtgctgaccgtgctgcaccaagattggctgaacggcaaggagtacaagtgtaaagtgtccaacaaggccctccccgcccccatcgagaagaccatcagcaaagccaagggccagcctagggagcctcaagtttataccctccctccttctcgtgaagagatgaccaagaatcaagtttctttaacatgcctcgtcaagggcttttaccctagcgacattgctgtggagtgggagtccaacggccagcccgagaacaactacaagaccaccccccccgtcctcgatagcgacggttctttctttttatattctaagctgaccgttgataagtcccggtggcagcaaggcaacgtgtttagctgctccgtgatgcacgaggctttacataatcactacacccagaagtccctctctttatcccccggtaagggcggagggggatccggcggagggggctctcaggtgcagctggtgcagagcggagccgaggtgaagaaacctggggcaagcgtgaaagtgagctgcaaggccagcggctacaccttcaccaactactacatgcactgggtgaggcaggcacctggtcaaggcctggagtggatgggcatgatcaaccccagcggaggagggaccagctacgcccagaagttccaaggccgcgtgaccatgactagggatacctccaccagcaccgtgtatatggagctgagcagcctgaggagcgaggacaccgccgtgtattactgcgccaggggcaatccctgggaactgagactggactactgggggcagggcaccctcgtgacagtgtcttctggaggcggaggatctggtggtggtggatctggcggcggaggaagtggtggcggaggctctgacatccagatgacccagagcccaagcagcctgagcgccagcgtgggcgacagggtgaccatcacctgccaggccagccaggacatctcaaactacctgaactggtatcaacagaagcccggcaaggcccccaagttgcttatctacgccgcgagcagcttgcaaagcggcgtgcccagcaggttcagcggtagtggcagtggcaccgactttaccctgaccataagcagtctgcagcccgaggacttcgccacctactactgccagcagtactacagctaccccttcaccttcggacccggaaccaaggtggacatcaaa

SEQ ID NO: 110745 - protein, 724 aa, Homo sapiens; identical to SEQ ID NO: 109522

SEQ ID NO: 110746 - DNA, 2260 bp, Homo sapiens
atgggatggagctgtatcatcctcttcttggtagcaacagctacaggtaaggggctcacagtagcaggcttgaggtctggacatatatatgggtgacaatgacatccactttgcctttctctccacaggtgtacactccgaggtgcagcttcttgagtctggcggtggtctggtgaagcccggtggcagcctgcgcctcagctgtgccgcaagcggcttcagtttcagcagctactggatgagctgggtgaggcaggcacccggcaagggccttgagtggatcagctacatcagcggcgactctggctacaccaactacgccgacagcgttaagggcaggttcaccatcagcagggacgatagcaagaacaccctgtacctgcagatgaatagcctgaagaccgaagacaccgccgtgtactactgcgccagccacgattacggagactatggagagtacttccagcactggggccagggcaccctggtgacggtgagctctggaggcggaggatctggtggtggtggatctggcggcggaggaagtggtggcggaggctctgacatccagatgacccagagcccctccagtcttagcgccagcgtgggcgacagggtgaccatcacctgccaggccagccaggacatcagcaactacctgaattggtatcagcagaagcccggcaaggcccccaagctcctgatctacgccgcgagctcactgcagagcggcgtgcccagcaggttcagtggcagcggaagcgggaccgacttcacgctgaccattagcagcctccagcctgaggacttcgccacctactactgccagcaagccatcagcttccccctgactttcggccagagcaccaaggtggagatcaagggcggagggggatccggcggagggggctctcaggtccagctgcagcagtctggggctgaactggcaagacctggggcctcagtgaagatgtcctgcaaggcttctggctacacctttactaggtacacgatgcactgggtaaaacagaggcctggacagggtctggaatggattggatacattaatcctagccgtggttatactaattacaatcagaagttcaaggacaaggccacattgactacagacaaatcctccagcacagcctacatgcaactgagcagcctgacatctgaggactctgcagtctattactgtgcaagatattatgatgatcattacagccttgactactggggccaaggcaccactctcacagtctcgagcgccagcaccaagggaccctccgtgttccctctggccccctccagcaagtccacatccggaggcaccgccgctctgggatgtctggtgaaggactacttccccgagcccgtgacagtgtcttggaactctggcgctttaaccagcggcgtccatacattccccgctgttttacagagctccggcctctactctttatccagcgtggtgaccgtccctagctccagcctcggaacccagacatacatctgcaatgtcaaccacaagccctccaacaccaaggtggataagagagtggagcccaagagctgcgacaaaacccatacatgccccccttgtcccgctcccgaactgctgggcggacctagcgtctttttattcccccccaagcccaaggacactttaatgatctctcgtacccccgaagtgacttgtgtcgtcgtggacgtgagccacgaggaccccgaggtcaagttcaactggtacgttgatggcgtggaagtgcacaacgccaagaccaaacctcgtgaagagcagtaccagtccacatatcgggtggtgtccgtgctgaccgtgctgcaccaagattggctgaacggcaaggagtacaagtgtaaagtgtccaacaaggccctccccgcccccatcgagaagaccatcagcaaagccaagggccagcctagggagcctcaagtttataccctccctccttctcgtgaagagatgaccaagaatcaagtttctttaacatgcctcgtcaagggcttttaccctagcgacattgctgtggagtgggagtccaacggccagcccgagaacaactacaagaccaccccccccgtcctcgatagcgacggttctttctttttatattctaagctgaccgttgataagtcccggtggcagcaaggcaacgtgtttagctgctccgtgatgcacgaggctttacataatcactacacccagaagtccctctctttatcccccggtaag

SEQ ID NO: 110747 - protein, 726 aa, Homo sapiens; identical to SEQ ID NO: 109569

SEQ ID NO: 110748 - DNA, 2260 bp, Homo sapiens
atgggatggagctgtatcatcctcttcttggtagcaacagctacaggtaaggggctcacagtagcaggcttgaggtctggacatatatatgggtgacaatgacatccactttgcctttctctccacaggtgtacactcccaggtccagctgcagcagtctggggctgaactggcaagacctggggcctcagtgaagatgtcctgcaaggcttctggctacacctttactaggtacacgatgcactgggtaaaacagaggcctggacagggtctggaatggattggatacattaatcctagccgtggttatactaattacaatcagaagttcaaggacaaggccacattgactacagacaaatcctccagcacagcctacatgcaactgagcagcctgacatctgaggactctgcagtctattactgtgcaagatattatgatgatcattacagccttgactactggggccaaggcaccactctcacagtctcgagcgccagcaccaagggaccctccgtgttccctctggccccctccagcaagtccacatccggaggcaccgccgctctgggatgtctggtgaaggactacttccccgagcccgtgacagtgtcttggaactctggcgctttaaccagcggcgtccatacattccccgctgttttacagagctccggcctctactctttatccagcgtggtgaccgtccctagctccagcctcggaacccagacatacatctgcaatgtcaaccacaagccctccaacaccaaggtggataagagagtggagcccaagagctgcgacaaaacccatacatgccccccttgtcccgctcccgaactgctgggcggacctagcgtctttttattcccccccaagcccaaggacactttaatgatctctcgtacccccgaagtgacttgtgtcgtcgtggacgtgagccacgaggaccccgaggtcaagttcaactggtacgttgatggcgtggaagtgcacaacgccaagaccaaacctcgtgaagagcagtaccagtccacatatcgggtggtgtccgtgctgaccgtgctgcaccaagattggctgaacggcaaggagtacaagtgtaaagtgtccaacaaggccctccccgcccccatcgagaagaccatcagcaaagccaagggccagcctagggagcctcaagtttataccctccctccttctcgtgaagagatgaccaagaatcaagtttctttaacatgcctcgtcaagggcttttaccctagcgacattgctgtggagtgggagtccaacggccagcccgagaacaactacaagaccaccccccccgtcctcgatagcgacggttctttctttttatattctaagctgaccgttgataagtcccggtggcagcaaggcaacgtgtttagctgctccgtgatgcacgaggctttacataatcactacacccagaagtccctctctttatcccccggtaagggcggagggggatccggcggagggggctctgaggtgcagcttcttgagtctggcggtggtctggtgaagcccggtggcagcctgcgcctcagctgtgccgcaagcggcttcagtttcagcagctactggatgagctgggtgaggcaggcacccggcaagggccttgagtggatcagctacatcagcggcgactctggctacaccaactacgccgacagcgttaagggcaggttcaccatcagcagggacgatagcaagaacaccctgtacctgcagatgaatagcctgaagaccgaagacaccgccgtgtactactgcgccagccacgattacggagactatggagagtacttccagcactggggccagggcaccctggtgacggtgagctctggaggcggaggatctggtggtggtggatctggcggcggaggaagtggtggcggaggctctgacatccagatgacccagagcccctccagtcttagcgccagcgtgggcgacagggtgaccatcacctgccaggccagccaggacatcagcaactacctgaattggtatcagcagaagcccggcaaggcccccaagctcctgatctacgccgcgagctcactgcagagcggcgtgcccagcaggttcagtggcagcggaagcgggaccgacttcacgctgaccattagcagcctccagcctgaggacttcgccacctactactgccagcaagccatcagcttccccctgactttcggccagagcaccaaggtggagatcaag

SEQ ID NO: 110749 - protein, 726 aa, Homo sapiens; identical to SEQ ID NO: 109524

SEQ ID NO: 110750 - DNA, 705 bp, Homo sapiens
atggacatgagggtgcccgctcagctgctgggactgctgctgctgtggctgcccggtgcgcgctgccaaattgttctcacccagtctccagcaatcatgtctgcatctccaggggagaaggtcaccatgacctgcagtgccagctcaagtgtaagttacatgaactggtaccagcagaagtcaggcacctcccccaaaagatggatttatgacacatccaaactggcttctggagtccctgctcacttcaggggcagtgggtctgggacctcttactctctcacaatcagcggcatggaggctgaagatgctgccacttattactgccagcagtggagtagtaacccattcacgttcggctcggggacaaagttggaaataaaccgtacggtggctgccccctccgtgttcatcttccccccctccgacgagcagctgaagtccggcaccgcctccgtggtgtgtttactgaacaacttctaccctcgtgaggccaaggtgcagtggaaggtggacaacgctttacagtccggcaacagccaagaatccgtgaccgagcaagattccaaggactccacatactctttatccagcactttaactttatccaaggccgactacgagaagcacaaggtgtacgcttgtgaggtgacccaccaaggtctgagctcccccgtgaccaagtccttcaatcgtggcgagtgc

SEQ ID NO: 110751 - protein, 235 aa, Homo sapiens; identical to SEQ ID NO: 109472

SEQ ID NO: 110752 - protein, 119 aa, Homo sapiens; identical to SEQ ID NO: 109478

SEQ ID NO: 110753 - protein, 330 aa, Homo sapiens; identical to SEQ ID NO: 109527

SEQ ID NO: 110754 - protein, 246 aa, Homo sapiens; identical to SEQ ID NO: 109476

SEQ ID NO: 110755 - protein, 213 aa, Homo sapiens; identical to SEQ ID NO: 109480

SEQ ID NO: 110756 - protein, 125 aa, Homo sapiens; identical to SEQ ID NO: 109483

SEQ ID NO: 110757 - protein, 330 aa, Homo sapiens; identical to SEQ ID NO: 109527

SEQ ID NO: 110758 - protein, 246 aa, Homo sapiens; identical to SEQ ID NO: 109476

SEQ ID NO: 110759 - protein, 216 aa, Homo sapiens; identical to SEQ ID NO: 109485

SEQ ID NO: 110760 - protein, 119 aa, Homo sapiens; identical to SEQ ID NO: 109478

SEQ ID NO: 110761 - protein, 330 aa, Homo sapiens; identical to SEQ ID NO: 109527

SEQ ID NO: 110762 - protein, 253 aa, Homo sapiens; identical to SEQ ID NO: 109486

SEQ ID NO: 110763 - protein, 213 aa, Homo sapiens; identical to SEQ ID NO: 109480

SEQ ID NO: 110764 - protein, 125 aa, Homo sapiens; identical to SEQ ID NO: 109483

SEQ ID NO: 110765 - protein, 330 aa, Homo sapiens; identical to SEQ ID NO: 109527

SEQ ID NO: 110766 - protein, 253 aa, Homo sapiens; identical to SEQ ID NO: 109486

SEQ ID NO: 110767 - protein, 216 aa, Homo sapiens; identical to SEQ ID NO: 109485

SEQ ID NO: 110768 - protein, 119 aa, Homo sapiens; identical to SEQ ID NO: 109478

SEQ ID NO: 110769 - protein, 330 aa, Homo sapiens; identical to SEQ ID NO: 109479

SEQ ID NO: 110770 - protein, 246 aa, Homo sapiens; identical to SEQ ID NO: 109476

SEQ ID NO: 110771 - protein, 237 aa, Homo sapiens; identical to SEQ ID NO: 109477

SEQ ID NO: 110772 - protein, 213 aa, Homo sapiens; identical to SEQ ID NO: 109480

SEQ ID NO: 110773 - protein, 125 aa, Homo sapiens; identical to SEQ ID NO: 109483

SEQ ID NO: 110774 - protein, 330 aa, Homo sapiens; identical to SEQ ID NO: 109479

SEQ ID NO: 110775 - protein, 246 aa, Homo sapiens; identical to SEQ ID NO: 109476

SEQ ID NO: 110776 - protein, 237 aa, Homo sapiens; identical to SEQ ID NO: 109477

SEQ ID NO: 110777 - protein, 216 aa, Homo sapiens; identical to SEQ ID NO: 109485

SEQ ID NO: 110778 - protein, 119 aa, Homo sapiens; identical to SEQ ID NO: 109478

SEQ ID NO: 110779 - protein, 330 aa, Homo sapiens; identical to SEQ ID NO: 109479

SEQ ID NO: 110780 - protein, 253 aa, Homo sapiens; identical to SEQ ID NO: 109486

SEQ ID NO: 110781 - protein, 237 aa, Homo sapiens; identical to SEQ ID NO: 109477

SEQ ID NO: 110782 - protein, 213 aa, Homo sapiens; identical to SEQ ID NO: 109480

SEQ ID NO: 110783 - protein, 125 aa, Homo sapiens; identical to SEQ ID NO: 109483

SEQ ID NO: 110784 - protein, 330 aa, Homo sapiens; identical to SEQ ID NO: 109479

SEQ ID NO: 110785 - protein, 253 aa, Homo sapiens; identical to SEQ ID NO: 109486

SEQ ID NO: 110786 - protein, 237 aa, Homo sapiens; identical to SEQ ID NO: 109477

SEQ ID NO: 110787 - protein, 216 aa, Homo sapiens; identical to SEQ ID NO: 109485

SEQ ID NO: 110788 - protein, 237 aa, Homo sapiens; identical to SEQ ID NO: 109477

SEQ ID NO: 110789 - protein, 246 aa, Homo sapiens; identical to SEQ ID NO: 109476

SEQ ID NO: 110790 - protein, 119 aa, Homo sapiens; identical to SEQ ID NO: 109478

SEQ ID NO: 110791 - protein, 330 aa, Homo sapiens; identical to SEQ ID NO: 109479

SEQ ID NO: 110792 - protein, 213 aa, Homo sapiens; identical to SEQ ID NO: 109480

SEQ ID NO: 110793 - protein, 237 aa, Homo sapiens; identical to SEQ ID NO: 109477

SEQ ID NO: 110794 - protein, 246 aa, Homo sapiens; identical to SEQ ID NO: 109476

SEQ ID NO: 110795 - protein, 125 aa, Homo sapiens; identical to SEQ ID NO: 109483

SEQ ID NO: 110796 - protein, 330 aa, Homo sapiens; identical to SEQ ID NO: 109479

SEQ ID NO: 110797 - protein, 216 aa, Homo sapiens; identical to SEQ ID NO: 109485

SEQ ID NO: 110798 - protein, 237 aa, Homo sapiens; identical to SEQ ID NO: 109477

SEQ ID NO: 110799 - protein, 253 aa, Homo sapiens; identical to SEQ ID NO: 109486

SEQ ID NO: 110800 - protein, 119 aa, Homo sapiens; identical to SEQ ID NO: 109478

SEQ ID NO: 110801 - protein, 330 aa, Homo sapiens; identical to SEQ ID NO: 109479

SEQ ID NO: 110802 - protein, 213 aa, Homo sapiens; identical to SEQ ID NO: 109480

SEQ ID NO: 110803 - protein, 237 aa, Homo sapiens; identical to SEQ ID NO: 109477

SEQ ID NO: 110804 - protein, 253 aa, Homo sapiens; identical to SEQ ID NO: 109486

SEQ ID NO: 110805 - protein, 125 aa, Homo sapiens; identical to SEQ ID NO: 109483

SEQ ID NO: 110806 - protein, 330 aa, Homo sapiens; identical to SEQ ID NO: 109479

SEQ ID NO: 110807 - protein, 216 aa, Homo sapiens; identical to SEQ ID NO: 109485

SEQ ID NO: 110808 - protein, 234 aa, Homo sapiens; identical to SEQ ID NO: 109547

SEQ ID NO: 110809 - protein, 246 aa, Homo sapiens; identical to SEQ ID NO: 109476

SEQ ID NO: 110810 - protein, 119 aa, Homo sapiens; identical to SEQ ID NO: 109478

SEQ ID NO: 110811 - protein, 330 aa, Homo sapiens; identical to SEQ ID NO: 109479

SEQ ID NO: 110812 - protein, 213 aa, Homo sapiens; identical to SEQ ID NO: 109480

SEQ ID NO: 110813 - protein, 234 aa, Homo sapiens; identical to SEQ ID NO: 109547

SEQ ID NO: 110814 - protein, 246 aa, Homo sapiens; identical to SEQ ID NO: 109476

SEQ ID NO: 110815 - protein, 125 aa, Homo sapiens; identical to SEQ ID NO: 109483

SEQ ID NO: 110816 - protein, 330 aa, Homo sapiens; identical to SEQ ID NO: 109479

SEQ ID NO: 110817 - protein, 216 aa, Homo sapiens; identical to SEQ ID NO: 109485

SEQ ID NO: 110818 - protein, 234 aa, Homo sapiens; identical to SEQ ID NO: 109547

SEQ ID NO: 110819 - protein, 253 aa, Homo sapiens; identical to SEQ ID NO: 109486

SEQ ID NO: 110820 - protein, 119 aa, Homo sapiens; identical to SEQ ID NO: 109478

SEQ ID NO: 110821 - protein, 330 aa, Homo sapiens; identical to SEQ ID NO: 109479

SEQ ID NO: 110822 - protein, 213 aa, Homo sapiens; identical to SEQ ID NO: 109480

SEQ ID NO: 110823 - protein, 234 aa, Homo sapiens; identical to SEQ ID NO: 109547

SEQ ID NO: 110824 - protein, 253 aa, Homo sapiens; identical to SEQ ID NO: 109486

SEQ ID NO: 110825 - protein, 125 aa, Homo sapiens; identical to SEQ ID NO: 109483

SEQ ID NO: 110826 - protein, 330 aa, Homo sapiens; identical to SEQ ID NO: 109479

SEQ ID NO: 110827 - protein, 216 aa, Homo sapiens; identical to SEQ ID NO: 109485

SEQ ID NO: 110828 - protein, 246 aa, Homo sapiens; identical to SEQ ID NO: 109476

SEQ ID NO: 110829 - protein, 119 aa, Homo sapiens; identical to SEQ ID NO: 109478

SEQ ID NO: 110830 - protein, 330 aa, Homo sapiens; identical to SEQ ID NO: 109527

SEQ ID NO: 110831 - protein, 213 aa, Homo sapiens; identical to SEQ ID NO: 109480

SEQ ID NO: 110832 - protein, 246 aa, Homo sapiens; identical to SEQ ID NO: 109476

SEQ ID NO: 110833 - protein, 125 aa, Homo sapiens; identical to SEQ ID NO: 109483

SEQ ID NO: 110834 - protein, 330 aa, Homo sapiens; identical to SEQ ID NO: 109527

SEQ ID NO: 110835 - protein, 216 aa, Homo sapiens; identical to SEQ ID NO: 109485

SEQ ID NO: 110836 - protein, 253 aa, Homo sapiens; identical to SEQ ID NO: 109486

SEQ ID NO: 110837 - protein, 119 aa, Homo sapiens; identical to SEQ ID NO: 109478

SEQ ID NO: 110838 - protein, 330 aa, Homo sapiens; identical to SEQ ID NO: 109527

SEQ ID NO: 110839 - protein, 213 aa, Homo sapiens; identical to SEQ ID NO: 109480

SEQ ID NO: 110840 - protein, 253 aa, Homo sapiens; identical to SEQ ID NO: 109486

SEQ ID NO: 110841 - protein, 125 aa, Homo sapiens; identical to SEQ ID NO: 109483

SEQ ID NO: 110842 - protein, 330 aa, Homo sapiens; identical to SEQ ID NO: 109527

SEQ ID NO: 110843 - protein, 216 aa, Homo sapiens; identical to SEQ ID NO: 109485

SEQ ID NO: 110844 - protein, 237 aa, Homo sapiens; identical to SEQ ID NO: 109477

SEQ ID NO: 110845 - protein, 246 aa, Homo sapiens
QVQLVQSGAEVKKPGASVKVSCKASGYTFTNYYMHWVRQAPGQCLEWMGMINPSGGGTSYAQKFQGRVTMTRDTSTSTVYMELSSLRSEDTAVYYCARGNPWELRLDYWGQGTLVTVSSGGGGSGGGGSGGGGSGGGGSDIQMTQSPSSLSASVGDRVTITCQASQDISNYLNWYQQKPGKAPKLLIYAASSLQSGVPSRFSGSGSGTDFTLTISSLQPEDFATYYCQQYYSYPFTFGCGTKVDIK

SEQ ID NO: 110846 - protein, 119 aa, Homo sapiens; identical to SEQ ID NO: 109478

SEQ ID NO: 110847 - protein, 330 aa, Homo sapiens; identical to SEQ ID NO: 109479

SEQ ID NO: 110848 - protein, 213 aa, Homo sapiens; identical to SEQ ID NO: 109480

SEQ ID NO: 110849 - protein, 237 aa, Homo sapiens; identical to SEQ ID NO: 109477

SEQ ID NO: 110850 - protein, 253 aa, Homo sapiens
QVQLVQSGAEVKKPGSSVKVSCKASGGTFSNFGVSWLRQAPGQCLEWMGGIIPILGTANYAQKFQGRVTITADESTSTAYMELSSLRSEDTAVYYCATPTNSGYYGPYYYYGMDVWGQGTTVTVSSGGGGSGGGGSGGGGSGGGGSDIQMTQSPSSLSASVGDRVTITCRASQSISSWLAWYQQKPGKAPKLLIYAASTLQSGVPSRFSGSGSGTDFTLTISSLQPEDFATYYCQQSYSIPLTFGGGTKVEIK

SEQ ID NO: 110851 - protein, 119 aa, Homo sapiens; identical to SEQ ID NO: 109478

SEQ ID NO: 110852 - protein, 330 aa, Homo sapiens; identical to SEQ ID NO: 109479

SEQ ID NO: 110853 - protein, 213 aa, Homo sapiens; identical to SEQ ID NO: 109480

SEQ ID NO: 110854 - protein, 9 aa, Homo sapiens
AAACSRMVI

SEQ ID NO: 110855 - protein, 9 aa, Homo sapiens
AADIIIGHL

SEQ ID NO: 110856 - protein, 526 aa, Homo sapiens; identical to SEQ ID NO: 109462

SEQ ID NO: 110857 - protein, 724 aa, Homo sapiens; identical to SEQ ID NO: 109522

SEQ ID NO: 110858 - protein, 235 aa, Homo sapiens; identical to SEQ ID NO: 109472

SEQ ID NO: 110859 - protein, 502 aa, Homo sapiens; identical to SEQ ID NO: 109470

SEQ ID NO: 110860 - protein, 468 aa, Homo sapiens; identical to SEQ ID NO: 109497

SEQ ID NO: 110861 - protein, 235 aa, Homo sapiens; identical to SEQ ID NO: 109472

SEQ ID NO: 110862 - protein, 502 aa, Homo sapiens; identical to SEQ ID NO: 109470

SEQ ID NO: 110863 - protein, 724 aa, Homo sapiens; identical to SEQ ID NO: 109471

SEQ ID NO: 110864 - protein, 235 aa, Homo sapiens; identical to SEQ ID NO: 109472

SEQ ID NO: 110865 - protein, 253 aa, Homo sapiens; identical to SEQ ID NO: 109541

SEQ ID NO: 110866 - protein, 724 aa, Homo sapiens; identical to SEQ ID NO: 109471

SEQ ID NO: 110867 - protein, 235 aa, Homo sapiens; identical to SEQ ID NO: 109472

SEQ ID NO: 110868 - protein, 724 aa, Homo sapiens; identical to SEQ ID NO: 109567

SEQ ID NO: 110869 - protein, 235 aa, Homo sapiens; identical to SEQ ID NO: 109472

SEQ ID NO: 110870 - protein, 119 aa, Homo sapiens; identical to SEQ ID NO: 109478

SEQ ID NO: 110871 - protein, 330 aa, Homo sapiens; identical to SEQ ID NO: 109527

SEQ ID NO: 110872 - protein, 253 aa, Homo sapiens; identical to SEQ ID NO: 109486

SEQ ID NO: 110873 - protein, 213 aa, Homo sapiens; identical to SEQ ID NO: 109480

SEQ ID NO: 110874 - protein, 125 aa, Homo sapiens; identical to SEQ ID NO: 109483

SEQ ID NO: 110875 - protein, 330 aa, Homo sapiens; identical to SEQ ID NO: 109527

SEQ ID NO: 110876 - protein, 253 aa, Homo sapiens; identical to SEQ ID NO: 109486

SEQ ID NO: 110877 - protein, 216 aa, Homo sapiens; identical to SEQ ID NO: 109485

SEQ ID NO: 110878 - protein, 119 aa, Homo sapiens; identical to SEQ ID NO: 109478

SEQ ID NO: 110879 - protein, 330 aa, Homo sapiens; identical to SEQ ID NO: 109479

SEQ ID NO: 110880 - protein, 253 aa, Homo sapiens; identical to SEQ ID NO: 109486

SEQ ID NO: 110881 - protein, 237 aa, Homo sapiens; identical to SEQ ID NO: 109477

SEQ ID NO: 110882 - protein, 213 aa, Homo sapiens; identical to SEQ ID NO: 109480

SEQ ID NO: 110883 - protein, 125 aa, Homo sapiens; identical to SEQ ID NO: 109483

SEQ ID NO: 110884 - protein, 330 aa, Homo sapiens; identical to SEQ ID NO: 109479

SEQ ID NO: 110885 - protein, 253 aa, Homo sapiens; identical to SEQ ID NO: 109486

SEQ ID NO: 110886 - protein, 237 aa, Homo sapiens; identical to SEQ ID NO: 109477

SEQ ID NO: 110887 - protein, 216 aa, Homo sapiens; identical to SEQ ID NO: 109485

SEQ ID NO: 110888 - protein, 253 aa, Homo sapiens; identical to SEQ ID NO: 109486

SEQ ID NO: 110889 - protein, 237 aa, Homo sapiens; identical to SEQ ID NO: 109477

SEQ ID NO: 110890 - protein, 119 aa, Homo sapiens; identical to SEQ ID NO: 109478

SEQ ID NO: 110891 - protein, 330 aa, Homo sapiens; identical to SEQ ID NO: 109479

SEQ ID NO: 110892 - protein, 213 aa, Homo sapiens; identical to SEQ ID NO: 109480

SEQ ID NO: 110893 - protein, 253 aa, Homo sapiens; identical to SEQ ID NO: 109486

SEQ ID NO: 110894 - protein, 237 aa, Homo sapiens; identical to SEQ ID NO: 109477

SEQ ID NO: 110895 - protein, 125 aa, Homo sapiens; identical to SEQ ID NO: 109483

SEQ ID NO: 110896 - protein, 330 aa, Homo sapiens; identical to SEQ ID NO: 109479

SEQ ID NO: 110897 - protein, 216 aa, Homo sapiens; identical to SEQ ID NO: 109485

SEQ ID NO: 110898 - protein, 234 aa, Homo sapiens; identical to SEQ ID NO: 109547

SEQ ID NO: 110899 - protein, 119 aa, Homo sapiens; identical to SEQ ID NO: 109478

SEQ ID NO: 110900 - protein, 330 aa, Homo sapiens; identical to SEQ ID NO: 109479

SEQ ID NO: 110901 - protein, 213 aa, Homo sapiens; identical to SEQ ID NO: 109480

SEQ ID NO: 110902 - protein, 253 aa, Homo sapiens; identical to SEQ ID NO: 109486

SEQ ID NO: 110903 - protein, 234 aa, Homo sapiens; identical to SEQ ID NO: 109547

SEQ ID NO: 110904 - protein, 125 aa, Homo sapiens; identical to SEQ ID NO: 109483

SEQ ID NO: 110905 - protein, 330 aa, Homo sapiens; identical to SEQ ID NO: 109479

SEQ ID NO: 110906 - protein, 216 aa, Homo sapiens; identical to SEQ ID NO: 109485

SEQ ID NO: 110907 - protein, 253 aa, Homo sapiens; identical to SEQ ID NO: 109486

SEQ ID NO: 110908 - protein, 253 aa, Homo sapiens; identical to SEQ ID NO: 109486

SEQ ID NO: 110909 - protein, 119 aa, Homo sapiens; identical to SEQ ID NO: 109478

SEQ ID NO: 110910 - protein, 330 aa, Homo sapiens; identical to SEQ ID NO: 109527

SEQ ID NO: 110911 - protein, 213 aa, Homo sapiens; identical to SEQ ID NO: 109480

SEQ ID NO: 110912 - protein, 253 aa, Homo sapiens; identical to SEQ ID NO: 109486

SEQ ID NO: 110913 - protein, 125 aa, Homo sapiens; identical to SEQ ID NO: 109483

SEQ ID NO: 110914 - protein, 330 aa, Homo sapiens; identical to SEQ ID NO: 109527

SEQ ID NO: 110915 - protein, 216 aa, Homo sapiens; identical to SEQ ID NO: 109485

SEQ ID NO: 110916 - protein, 4 aa, Homo sapiens
ELLG

SEQ ID NO: 110917 - protein, 4 aa, Homo sapiens
EFLG

SEQ ID NO: 110918 - protein, 119 aa, Homo sapiens; identical to SEQ ID NO: 109478

SEQ ID NO: 110919 - protein, 330 aa, Homo sapiens; identical to SEQ ID NO: 109527

SEQ ID NO: 110920 - protein, 246 aa, Homo sapiens; identical to SEQ ID NO: 109476

SEQ ID NO: 110921 - protein, 213 aa, Homo sapiens; identical to SEQ ID NO: 109480

SEQ ID NO: 110922 - protein, 125 aa, Homo sapiens; identical to SEQ ID NO: 109483

SEQ ID NO: 110923 - protein, 330 aa, Homo sapiens; identical to SEQ ID NO: 109527

SEQ ID NO: 110924 - protein, 246 aa, Homo sapiens; identical to SEQ ID NO: 109476

SEQ ID NO: 110925 - protein, 216 aa, Homo sapiens; identical to SEQ ID NO: 109485

SEQ ID NO: 110926 - protein, 119 aa, Homo sapiens; identical to SEQ ID NO: 109478

SEQ ID NO: 110927 - protein, 330 aa, Homo sapiens; identical to SEQ ID NO: 109479

SEQ ID NO: 110928 - protein, 246 aa, Homo sapiens; identical to SEQ ID NO: 109476

SEQ ID NO: 110929 - protein, 237 aa, Homo sapiens; identical to SEQ ID NO: 109477

SEQ ID NO: 110930 - protein, 213 aa, Homo sapiens; identical to SEQ ID NO: 109480

SEQ ID NO: 110931 - protein, 125 aa, Homo sapiens; identical to SEQ ID NO: 109483

SEQ ID NO: 110932 - protein, 330 aa, Homo sapiens; identical to SEQ ID NO: 109479

SEQ ID NO: 110933 - protein, 246 aa, Homo sapiens; identical to SEQ ID NO: 109476

SEQ ID NO: 110934 - protein, 237 aa, Homo sapiens; identical to SEQ ID NO: 109477

SEQ ID NO: 110935 - protein, 216 aa, Homo sapiens; identical to SEQ ID NO: 109485

SEQ ID NO: 110936 - protein, 246 aa, Homo sapiens; identical to SEQ ID NO: 109476

SEQ ID NO: 110937 - protein, 237 aa, Homo sapiens; identical to SEQ ID NO: 109477

SEQ ID NO: 110938 - protein, 119 aa, Homo sapiens; identical to SEQ ID NO: 109478

SEQ ID NO: 110939 - protein, 330 aa, Homo sapiens; identical to SEQ ID NO: 109479

SEQ ID NO: 110940 - protein, 213 aa, Homo sapiens; identical to SEQ ID NO: 109480

SEQ ID NO: 110941 - protein, 246 aa, Homo sapiens; identical to SEQ ID NO: 109476

SEQ ID NO: 110942 - protein, 237 aa, Homo sapiens; identical to SEQ ID NO: 109477

SEQ ID NO: 110943 - protein, 125 aa, Homo sapiens; identical to SEQ ID NO: 109483

SEQ ID NO: 110944 - protein, 330 aa, Homo sapiens; identical to SEQ ID NO: 109479

SEQ ID NO: 110945 - protein, 216 aa, Homo sapiens; identical to SEQ ID NO: 109485

SEQ ID NO: 110946 - protein, 234 aa, Homo sapiens; identical to SEQ ID NO: 109547

SEQ ID NO: 110947 - protein, 119 aa, Homo sapiens; identical to SEQ ID NO: 109478

SEQ ID NO: 110948 - protein, 330 aa, Homo sapiens; identical to SEQ ID NO: 109479

SEQ ID NO: 110949 - protein, 213 aa, Homo sapiens; identical to SEQ ID NO: 109480

SEQ ID NO: 110950 - protein, 246 aa, Homo sapiens; identical to SEQ ID NO: 109476

SEQ ID NO: 110951 - protein, 234 aa, Homo sapiens; identical to SEQ ID NO: 109547

SEQ ID NO: 110952 - protein, 125 aa, Homo sapiens; identical to SEQ ID NO: 109483

SEQ ID NO: 110953 - protein, 330 aa, Homo sapiens; identical to SEQ ID NO: 109479

SEQ ID NO: 110954 - protein, 216 aa, Homo sapiens; identical to SEQ ID NO: 109485

SEQ ID NO: 110955 - protein, 246 aa, Homo sapiens; identical to SEQ ID NO: 109476

SEQ ID NO: 110956 - protein, 246 aa, Homo sapiens; identical to SEQ ID NO: 109476

SEQ ID NO: 110957 - protein, 119 aa, Homo sapiens; identical to SEQ ID NO: 109478

SEQ ID NO: 110958 - protein, 330 aa, Homo sapiens; identical to SEQ ID NO: 109527

SEQ ID NO: 110959 - protein, 213 aa, Homo sapiens; identical to SEQ ID NO: 109480

SEQ ID NO: 110960 - protein, 246 aa, Homo sapiens; identical to SEQ ID NO: 109476

SEQ ID NO: 110961 - protein, 125 aa, Homo sapiens; identical to SEQ ID NO: 109483

SEQ ID NO: 110962 - protein, 330 aa, Homo sapiens; identical to SEQ ID NO: 109527

SEQ ID NO: 110963 - protein, 216 aa, Homo sapiens; identical to SEQ ID NO: 109485

SEQ ID NO: 110964 - protein, 528 aa, Homo sapiens; identical to SEQ ID NO: 109463

SEQ ID NO: 110965 - protein, 726 aa, Homo sapiens; identical to SEQ ID NO: 109524

SEQ ID NO: 110966 - protein, 235 aa, Homo sapiens; identical to SEQ ID NO: 109472

SEQ ID NO: 110967 - protein, 503 aa, Homo sapiens; identical to SEQ ID NO: 109473

SEQ ID NO: 110968 - protein, 468 aa, Homo sapiens; identical to SEQ ID NO: 109497

SEQ ID NO: 110969 - protein, 235 aa, Homo sapiens; identical to SEQ ID NO: 109472

SEQ ID NO: 110970 - protein, 503 aa, Homo sapiens; identical to SEQ ID NO: 109473

SEQ ID NO: 110971 - protein, 725 aa, Homo sapiens; identical to SEQ ID NO: 109474

SEQ ID NO: 110972 - protein, 235 aa, Homo sapiens; identical to SEQ ID NO: 109472

SEQ ID NO: 110973 - protein, 253 aa, Homo sapiens; identical to SEQ ID NO: 109541

SEQ ID NO: 110974 - protein, 725 aa, Homo sapiens; identical to SEQ ID NO: 109474

SEQ ID NO: 110975 - protein, 235 aa, Homo sapiens; identical to SEQ ID NO: 109472

SEQ ID NO: 110976 - protein, 726 aa, Homo sapiens; identical to SEQ ID NO: 109569

SEQ ID NO: 110977 - protein, 235 aa, Homo sapiens; identical to SEQ ID NO: 109472

SEQ ID NO: 110978 - protein, 253 aa, Homo sapiens; identical to SEQ ID NO: 109467

SEQ ID NO: 110979 - protein, 330 aa, Homo sapiens; identical to SEQ ID NO: 109527

SEQ ID NO: 110980 - protein, 9 aa, Homo sapiens
QYDPVAALF

SEQ ID NO: 110981 - protein, 9 aa, Homo sapiens
TYGPVFMSL

SEQ ID NO: 110982 - protein, 9 aa, Homo sapiens
KYTSFPWLL

SEQ ID NO: 110983 - protein, 408 aa, Homo sapiens
MGSHSMRYFFTSVSRPGRGEPRFIAVGYVDDTQFVRFDSDAASQRMEPRAPWIEQEGPEYWDGETRKVKAHSQTHRVDLGTLRGYYNQSEAGSHTVQRMYGCDVGSDWRFLRGYHQYAYDGKDYIALKEDLRSWTAADMAAQTTKHKWEAAHVAEQLRAYLEGTCVEWLRRYLENGKETLQRTDAPKTHMTHHAVSDHEATLRCWALSFYPAEITLTWQRDGEDQTQDTELVETRPAGDGTFQKWAAVVVPSGQEQRYTCHVQHEGLPKPLTLRGGGGGGGGGGGMGIQRTPKIQVYSRHPAENGKSNFLNCYVSGFHPSDIEVDLLKNGERIEKVEHSDLSFSKDWSFYLLYYTEFTPTEKDEYACRVNHVTLSQPKIVKWDRDMGGGGGGGGGGGGAIFPGAVPAA

SEQ ID NO: 110984 - protein, 41 aa, Homo sapiens
RMEPRAPWIEQEGPEYWDGETRKVKAHSQTHRVDLGTLRGY

SEQ ID NO: 110985 - protein, 25 aa, Homo sapiens
AADMAAQTTKHKWEAAHVAEQLRAY

SEQ ID NO: 110986 - protein, 407 aa, Homo sapiens
MGSHSMRYFFTSVSRPGRGEPRFIAVGYVDDTQFVRFDSDAASQKMEPRAPWIEQEGPEYWDQETRNMKAHSQTDRANLGTLRGYYNQSEDGSHTIQIMYGCDVGPDGRFLRGYRQDAYDGKDYIALNEDLRSWTAADMAAQITKRKWEAVHAAEQRRVYLEGRCVDGLRRYLENGKETLQRTDPPKTHMTHHPISDHEATLRCWALGFYPAEITLTWQRDGEDQTQDTELVETRPAGDGTFQKWAAVVVPSGEEQRYTCHVQHEGLPKPLTLRGGGGGGGGGGGMGIQRTPKIQVYSRHPAENGKSNFLNCYVSGFHPSDIEVDLLKNGERIEKVEHSDLSFSKDWSFYLLYYTEFTPTEKDEYACRVNHVTLSQPKIVKWDRDMGGGGGGGGGGGASSLPTTMNY

SEQ ID NO: 110987 - protein, 41 aa, Homo sapiens
KMEPRAPWIEQEGPEYWDQETRNMKAHSQTDRANLGTLRGY

SEQ ID NO: 110988 - protein, 25 aa, Homo sapiens
AADMAAQITKRKWEAVHAAEQRRVY

SEQ ID NO: 110989 - protein, 407 aa, Homo sapiens
MGSHSMRYFFTSVSRPGRGEPRFIAVGYVDDTQFVRFDSDAASQRMEPRAPWIEQEGPEYWDGETRKVKAHSQTHRVDLGTLRGYYNQSEAGSHTVQRMYGCDVGSDWRFLRGYHQYAYDGKDYIALKEDLRSWTAADMAAQTTKHKWEAAHVAEQLRAYLEGTCVEWLRRYLENGKETLQRTDAPKTHMTHHAVSDHEATLRCWALSFYPAEITLTWQRDGEDQTQDTELVETRPAGDGTFQKWAAVVVPSGQEQRYTCHVQHEGLPKPLTLRGGGGGGGGGGGMGIQRTPKIQVYSRHPAENGKSNFLNCYVSGFHPSDIEVDLLKNGERIEKVEHSDLSFSKDWSFYLLYYTEFTPTEKDEYACRVNHVTLSQPKIVKWDRDMGGGGGGGGGGGAIFPGAVPAA

SEQ ID NO: 110990 - protein, 10 aa, Homo sapiens
FPAERDISVY

SEQ ID NO: 110991 - protein, 9 aa, Homo sapiens
SPAPSLESY

SEQ ID NO: 110992 - protein, 9 aa, Homo sapiens
TAFESIKSV

SEQ ID NO: 110993 - protein, 9 aa, Homo sapiens
AETSYVKVL

SEQ ID NO: 110994 - protein, 9 aa, Homo sapiens
ALLEEEEGV

SEQ ID NO: 110995 - protein, 9 aa, Homo sapiens
DEDGKIVGY

SEQ ID NO: 110996 - protein, 11 aa, Homo sapiens
GLWEIENNPTV

SEQ ID NO: 110997 - protein, 9 aa, Homo sapiens
GVHGGILNK

SEQ ID NO: 110998 - protein, 406 aa, Homo sapiens
MGSHSMRYFFTSVSRPGRGEPRFIAVGYVDDTQFVRFDSDAASQKMEPRAPWIEQEGPEYWDQETRNMKAHSQTDRANLGTLRGYYNQSEDGSHTIQIMYGCDVGPDGRFLRGYRQDAYDGKDYIALNEDLRSWTAADMAAQITKRKWEAVHAAEQRRVYLEGRCVDGLRRYLENGKETLQRTDPPKTHMTHHPISDHEATLRCWALGFYPAEITLTWQRDGEDQTQDTELVETRPAGDGTFQKWAAVVVPSGEEQRYTCHVQHEGLPKPLTLRGGGGGGGGGGGMGIQRTPKIQVYSRHPAENGKSNFLNCYVSGHFPSDIEVDLLKNGERIEKVEHSDLSFSKDWSFYLLYYTEFTPTEKDEYACRVNHVTLSQPKIVKWDRDMGGGGGGGGGGGNTDNNLAVY

SEQ ID NO: 110999 - protein, 36 aa, Homo sapiens
WIEQEGPEYWDQETRNMKAHSQTDRANLGTLRGYYN

SEQ ID NO: 111000 - protein, 27 aa, Homo sapiens
DMAAQITKRKWEAVHAAEQRRVYLEGR

SEQ ID NO: 111001 - protein, 12 aa, Homo sapiens
TDRANLGTLRGY

SEQ ID NO: 111002 - protein, 9 aa, Homo sapiens
LRSWTAADM

SEQ ID NO: 111003 - protein, 41 aa, Homo sapiens
RTEPRAPWIEQEGPEYWDRNTQIFKTNTQTYRESLRNLRGY

SEQ ID NO: 111004 - protein, 25 aa, Homo sapiens
AADTAAQITQRKWEAARVAEQLRAY

SEQ ID NO: 111005 - protein, 22 aa, Homo sapiens
AADMAAQTTKHKWEAAHVAEQL
